United States Patent Application Publication US 2020/0329713 A1 - sequence listing, part 11

SEQ ID NO: 4 - DNA, 6648615 bp, Bacillus thuringiensis (residues 1-1,662,154 of 6,648,615)
ccctccagataaaacagtattgagtccatcatatcagatggactctttttttactgtctacctataggggataataccatgttccctctttttttataaagtaaaactttaattagtggaggagggcatcatccactaattattagctcacaccaatcgggataaaagtaaggggaatgagagatggatatatacttattaatcgtcacgttacttgcgatcacaattgttattttaggggtatcatggtggaaatggcatgcatttattagtttaacagttgcgagtttatttttagctattatgtctggactgaatgtaacgaaaatagtggctgcctatgaaactggtgttggtagtgtactagggcatttagttggtattttagcacttggaacaattttaggaaaaatgatgtccgattcaggggcaggcatgcaagttgcagatttctttattcgatttttcggtgtaaaaaaattaccttgggctatgttatttgcagggtttgttatagggattcccgtattttttgaagtggggattgtcattttattaccactcgttatttcaattcgaaaaacgacgaagcaaaatatattattaattgcgttacctgtcattgcaggattatctattgttcacgggctcgtaccaccacatccaggggcgatgacagcaatcggtatttataacgcgaacttaggaaaggtacttttatattcattaattatcgcgttaccaacagccattatcgcaggcccaatatttgcaaagtgggtacataagagggttatacctgaaaatgaaccggagcttgttcgagttacgacagtatcaactgatttgccaagtcgtaaagtttcattctttattattttattaccagttgtattgatgattttatcagtagttgcaccatatatttcattaccgaaaaaattgactgaattttttgtgtttatagggagtccagtaatcgccttacttatttcatgtttcgcagcattttatttacttggtatcaaacaaggtattaataaaaagatgattaaaaaattaacagatgaaagtttattgcctgtcggttctattattttaataattggtgcaggcggtggatttaaacaaatattaattgaaagcggcgttggaacagctattgcacaaatggcagaacatatttcgttatcaccaattgtattagctttcatggtagctggtttaattcgaattgcaacaggttcagctacagtagcattaacgacagcagcagggattgtttcaccagttattcagcacatgtctggtgtgaatttagagttgctagttattgcaaccggtgcaggatcattaatgttttctcacgtaaatgatgcagggttctggcttgtaaaagagtatttaggtttgacggtgaaggaaacatttaaaacgtggacggtactcgagacattgttatcatttattgcatttggttttgctcttttgttgaatatgtttctttagggagaaaagcccattttaattaataaaacccacaggagaaattcaatttctctgtgggttttgctattttttaatcgtagttacttacaaatatacagggcaaggtgctttttatatcttttttctattgtcctattatttaatagaacggacatactgattttctccatcgtctttgacaaagactcctagctcattcaaatctttgcgtaaatgcttcttttttttcgagtttccttctcgaagggcatttcgtctttcatacaaaatagtatttatgcttttattaaatcgcgcatcctctaatttccataagctatactcatgtttataaggatcttgttccacccaggggaagtcgtgcattaagaaagtatctttaattttgcttggggtaatgtcagatgtttcacgtaaccattctcggtcttcttgatcaatgataaccacttgacgcttatctacaaaaacggcttttacatttgatctggtgatttgtttcttttgatcgtccttattcacgtgaatgctttccgaagtaatgttcatttttaaagcttcactataaataattaaagaaaataaaattcctgcaataacaccaattagcatgaggataataggaagccagaagggattaataaaatttaaaagttctataatttttgaatcagaaaagagaggaatcttttttataatctctattaatttaggtgaaaaatatccaataacgcctaaaaggattggacttactatagcaagtaacttttctaaaaaacctaatccaatgacagatgcctttttcatgtgtagttcatcctttcttatatatattttttaaccagggcatgttttaaatagtgagttttttcaccatttttatgagctcatctgagtaattttctatggatatagatgaatttgccttcaacattctttcttcgattgctcctaaaataaatgaagctaatgtgtcggtttgaaaagagttagaaaacacgccattttgttgtccagtcttcaaaatatctaataacatcgttctaagagcatcctcttcgtcgtcttcgattctgtaataaggaatgttctcttcatttcttgcattaaagacaatctcaattaaggcaatattatttttgtaatgagtttcttgataagccaagtgtgcttcaataaaagcctctagtttatttatttcagattgagctaatagtactcgattactaataaattcatgttgtttggcaactaaaaattgtaatgtacggttcataaggtaaagcttatcattaaaatgataagaaataagtccggtactaatcttagccttttttgccaccttcgttaagctcaagttgttatatccaacctcttctaatgtatcaatacatgcaagaataatttgttcacgcctagcctctgcaataaaagaatcagtcacgctattcaactcctgatttatataatttgaatgtataatcaaaaaattgattgatcgttcaattaaatattagtaagaaattattagtatgtcaaatgttttatacctacatcttgataaggctcattttctgaaacaagcccgtttttaagaaagccaagcttcctattcgccctgaaaacatactataaatggaatcccctcatttagaacaagaggaacttgttatgaatgatactaaaggaggaatagggtaatgagcgaaaagtgtgaacacagacatgatgattgtaaccgcagacatggttgcggaggcggttttgcgcttctaatcgtattgtttattttattaattatcatcggtgctagctgcttcggcggaggcggcggttgtggttatggcggttacggcggctacggatatggtggctacggcggatattgctgctaattattaaaaactattgaaaatggccttgtgcaatacgcacaaggccattttattcatatttttatatgctgtgataatttattaatgtacagagaacggattaagaagaagaaaatgatctcgataatcccgaaaaaggtgagtacgatacatgtctcttttagtaaggagaaagaaaacatgctttgtaaaaacttaaccgcaaataatgtgtgaacaccagcaacgatgtaaggaacgaaaaataaaattcctaattgaatcgttgcagagcgaaacatttctgattcagttaagccaagctttgtaatcgtaatatacttttgtctttcagttgttaagtcattatacatacggaagtatagaacactagccgcaccgataaagaaaataaagccgagaaatgcccaaataaagaattgagcaactgcatttcctttaccgtaaatgagttcatccgtagccgtatgtatgaagaaaggaacttgagcgttctcttctgtatgcttttcgtagaactcacgcgcatcgccactaataacacgtaacatatttttggttggaacgattgcattttcccagttttctacgaagtagttatagattacagttgtttcaatatgaggaatcatattatcaaatacataatcttgtacgacagctaaatgtgggaatgcaaaggatggttcgattcccttattaataaaccctttaatatgaaattcttttttattagacccgagtgtaatcgtattttgctttgcaaatggattagatacgagatcgagaagttctggtgagtgccgagaaataatataaacttctgtagaatcgattgttatttccggtcttttcaattgtttagcaattgcgttataatcactcatcttcataagcataatatcttctttggaagctgtatcttttaatactgtaaacttatattttttgtaaagaaaattattagttgtaagctccgtttcaattgtagaaatatgcttttgttcaagggaattgtcaccttctgatgtatacgtgaagggaacgggatatcgctctaatactgatgccttcgtattgttattagcggcgaataatccaataataatcgtaaatgcaagtgcagatagcatagaaacaataaagagtacattaatattactgcgtgtacgagaaactaaatctgaaatccataacatatttatttgtttcaaataaaactttctgcgcttctttaaaatatagatgaaaagaaggaatgtttgtgaaaagaataaatatgtcccgactattacgagcggtaaaatagataacataataaaaaagacagatccattttgcacatttttttccgttacgtagcctcgcggataaccagcgatataatagcatagccctaaacaaattaaagcgaataaagagatgagtatagatggtcttttttcagctggcattttcttgttccctttaatgaggtgggctgtctttcgagtacgaataaacattggtgtaaatgtagaaacgattaaaaataaaatgataaacgttacggttgtaacgataatcgcttctgttggccaatataaatagagacctttcgcacttgttaatttcgaagtgactaataagaaaaagttagaaaatacaagtccaccttgaatgccgataaagatagataatatcccaattatcatgttttcggtaaataacaatctttttaattgtctctgtgagataccaagaatagtgagtatcccgaattgctgcttccgaacatttaaaaatgttccaattgaatataagagaaagaagaacgagaacataacgatcacaagttgtgctgtactagctaagttcattagaggatcacgttcttgaaagctttgtacactctgtaagcgcggatgatacgcgtatacagtaaatgaaaagaaaaccatgatagaaaaagcactacttacaaagtaggcgaaatatgctttcgaattacgtgagacatttttaaatgcgaattgccaaaatgtcatccacgtcttcctcctaataacgctagaacatctaatatttcttgataaaatttctcgcgatataatccgcggtgtagttcattgtaaagctctccatctttaatgaaaataacacggttacaataacttgctgcaaacggatcgtgcgtaaccattaaaatcgttgcatcttcttctttatttaatttcgtaaataactccattacgtcaattgccgcttttgaatctaagtttcctgtcggttcatcggctagtaagagagaagggtgatgaataacagcacgtgctactgcggtacgctgtgcttgtcccccagaaacttcaaaaatacgcttgtccaaaatatgatcaattccaagcttttttgaaatgttatcaagcttttcatccatttcttttaatggaacattatctaatgttaaaggtagtacgatattttcaccgattgttagtgtatctagtaggttaaagttttggaaaacaaatcctaactcttgtcttcggaaaatagctaacttctctctacgaaatgtgtgcggtttttttccgttaatcacgacatcaccagaagtcggagaatcgattgtagagataacgtttaaaaatgtagattttccgctaccagatggtcccataatggcaacgaattcccctttatccacgtgtaaatttatattttttaaagcagtatgagggactttcccctcatatacttttgagacgttttttatgtgtaatacttcttccatagtaatcacctttctactttttaaaacttaatgtgttgtgataatttttgcatataaaaggaacgaattaaaaggaaaaataaaatttcaactgttccaaaaatcaacagtacgactgtaatttcagcgaagaacgagagatgtaatatttcttgtagcatctttgtcgcaaacatcgtatggattgatgccataatgtaaggtacgaagaaaagaatcgcaagctgaattgtcgctgaacgtttcatttcagtctcagttaagccgattttcgtaatcgttatatatttttcttgctcatttgttaaatctgtatacatccggaagtaaagaacactgccagcaccgataaagaaaataactcctaggaaagtaccaattaagaagaacgaagcgacatttagttttgtcttatatagagaatcgctcgcttcacttgcatggaaaggtggatgctctgcttgaattgctgcattatcgttatggatttttgttataaacgatgaaccgatattatgtgctttttcccaatctgtaactttaaagctatatacactcatttgttttgaaacgttggataatgcttctacattttcatcagatagtatgagcaattggtatattaagcgatttgggaatgggttataacttttatattctttcacttgtagttgtaaattgttttgagtaagtgtaagagtatttttgttgtctttattatgaagcgttccaataacttgatcatctaagtctttcataagaatataagattcattcttattgaccgtgagcgtttcccaatttaaagccttagcaagtacattatagtcactttgtttaatggcataatagagctgcgtgttatcttcagccgaagatacttcatatatatccgttttaaattttgtataagtaaagtgctcttcattaaatttctgctctaaccagtttaaatgttcatcagctaacgtattttcagtatgtgataaataagtaaacgggaaagggttttgtctaatttcatcaaactttgtaaacttcccgaatccatataagaatgtaatcattgtaaaagcgagcgtcgatagcatcgctacaataaagagcatgttaatgtttgtccgaatacgtgatgctagatctgaaatccaaagcatattaattcgtttcatataaaactttcttcgtgtttttaaaatacgaataagtaaaaaactaatttgtgaaaagaaaaagtatgttccagctgcaataagcgatgggatgacaaatatactagagacggcatataaaagcccaattatgtcacctagcgacataaaatacagcggatttgcggctaacgcatatccacatattaaacaggtcgcaccaaatagagagatgagcacggatgcttttctttctttttgttgttttccttcttttaaaagacgtacggcttttctcgtgcgaatgagcatcggtgtaaaagatgatacgagaatgaagaggccgagaaagatgatgatagttaaaacgatagcacttgtaggcggatataaatataaaccaggtacgtgtgtaattttggcggtaactaacaaaaagaactgtgaaaagacaagtccaagttgaatgccaaaaaatatagaaagagcaccaattaacatattttctataaatatgagtcgctttaattgtttttgagatatgccaagcactgttaaaatcccgaactgtttttttcgtacttttaaaaacgtcccgattgaatacagtaaaaagaaaaatgaaaagaacacaatgacaacttctgaaattgtcattaatatgttcagagaaaaattcacgtctgtcatatgcaatttaggatgaaataaataaactgcaaatgagaaaaagattgcgatggagaacgcactgcttacaaaataggcgaaataagctctggcgtttcttgtgacgtttttaaatgcaaactgccaaaatgtcattcacctaaacctcctaatagggtgaagatgaaaagagtatgagagatactcttttcatcaagtttgttttaaatattttgtccactcgtgtaatgtgataatttttgcatataaagtgaacgaatgaataagaaaaatacgatttcaacgaatccaaaaataataagaacggctgaaacttctttgaacagagataaaccaattacatcttgtagcatttttgttgcgaacattgtatgaatggatgccataatgtacggaatgaaaaataaaatactaagttgaatggttgcagatcgtttcatctctgtatctgttacaccgattttagaaatcgttatatatttctcttgttcgttcgtcaaatccgtatacattctaaagtaaagaacgctaccagctccaatgaagaaaataactcctaaaaatgtcccgattaggaagtacgcggcactacctgatgttattttgtataacgatcctgctgattcaaaggaacgaataagaggcccttcatactggtatttatttcgatctttttgtaccttttctataaaattatcagcaatttcatatgtctgttcccagttttgaattttgtaattgtatgctgatatatgttttacggtgttaggtaagttatttacgataacatcaggcaacactatcgtttgatatgaaaagtcagatgggattgcgtttacatgctcatagcctttaactcttaatttcgtatttgtactagagagtgtaatgtaatctctattgtagctttgctcaaattcgttgaatatggtgatataagatgtccctgttaacacatatgcttcgttatcatccataaatagttgtttcattcgtaaagaattcgcaagtttgttatagtcactttgcttaattgcgtatacgtcattataaatagctatatctttatcttcttttagtggtgtttcatatatatcagcttttattttttgataagggaaatgctctttttgtaattgttgctcaagccaatttaaatgctctgtaacaaaagggttcgcatcatacgagaaataagaaattgggaaaggggaagttctattcacctctagcttaataaatttcccgaatccatataggaacgtgatcattgtgaaagcaattgtagagagcatcgctacaataaaaagcatattaatattcgtccgaatacggtttgctaaatctgaaatccaaagcatattaatccgtttcatataaaatcttcttcttttctttaaaatataaatcagtaagaaactaatttgagaaaagaaaaaatatgttcctattgtaacaagcattgggataacgaaaatactcgaaaccatatatataacaccgatttgcgggcttactgatacgaaatatttaggatttccagctaacgcataaccaccaaataaacaaatcgcaccaaataatgaaacaagtatggatggttttctttctttttgttttccaccatttgtttttaaaaggtgtaccgctttttttgtacgaataagcattggtgtgaatgcagatacaatgataaaaagactaaggaaaacaatggttgttaaaataaacgcgttagtaggaccgtataaatatattcctggaacatgcgtaagtttggctgttactaataaaaaaaattgagaaaaaacaactccaaactgcatgccgaaaaagatagataaaatcccgattaacatattctccataaaaacaagacgatgtaattgttttcttgatattcctaaaatggtcaaaacaccaaattgtttttttctaactttaaaaaaagtaccaatggaatatagtaaaaagaagaaagagaaaaatacaattactacttctgaaaatatcattaatcctgaaatttcagaggtcatgtcaaagttttgtaatttcggatggaataagtaaacagcaaacgaaaagaacacagcaatggaaaaggaactacttacaaagtaagcaaaataagctctcgagttgcgcgtgacgtttttaaatgcaaattgccaaaatgtcatagattatacctccggctagaagatatagaagtagttgtattgcaaaaaatgtatgagagtgtgttctcatacattttgcttgcatatgttacgatcatgcttcggtcaccttctccgtatgttctgcttgattatttgcagcgttgtggaagatgattttaatcgtcgttcctttaccaacttcagaatctagtttgacagagtgacctaaataatcacaaattttacttacaatataaagccccataccagtagattctccgaatgcgcgaccgtttttcccagtgtaaaatggttcaaatactcttcgaatatcttcttgcggaataccaacaccttcatcacgaacttctaaaataatatcctttccgtttcggtaagcagataagaaaactttctttccgcgctcaccagagtaacgaacagcatttgtcattaactgatagatgataaattttagccatttcgcatcagaagcaacttttaaatcagaatggacttctaaaacagggaagacaccattacgaatgaatagttcttttaatccgttaatattttttgttaccgtatcttttaatgaaatcgtctcaacatggaaatcttcatggaagttatttaacctagccatgtataaagccatatcaagcccttggtttagacgctctaattcttttttaaactttggaattaaatgctcgtcttccatttctagcaccataagctgcataacagaaacaggtgtcttcatttgatgtacccagtggttaatgaataattgatgttcttgttgttttacttcatacgattgtagttctttttggaagaggcggtactgcgtacgcacgagttcattgacaccgtgaggcatcggagcagttgctctttcaataaacgcatcttccattttttctggttgctcgcttaatctatggtacattctacgattgcgaacgtaacggtaagcgaggaaacaaataaataaatataaacttaaaacgacgaaataaaatttattgttttgaaatccatctactgcatcataaagaacgaaaatgataccgaagtttaaaacgtacagtaggaaaaatgcaaaatgatcacgtaaaaatagcttcatgcttattcactccaagttgcgttaaagcgatatccaagtccacgtactgtttcaatagagttctcaataccaagctcattaaactttttacgaagacgcgtaatgtttacgtttaatgtattttcttcaacgaagctttcgtcatcccaaagcgcagctaataaatcttcacggcttgctgtacgagggaatttagataataacatttcagctaaaatagcttcttttttcgttaaaagaacttgttcagatccgaagtgaatttcaggacgttctgggaatagttttaaaccttctacttcaacgatacgttcagaaatatttggtgcataatcaccgtaaatacggcgtaattgtcctttaatttttgccattacaacgtcgtagtggaatggttttgtaatgtaatcatccgcaccgctttcaattgccataatttgttccatctcaccagcacgcgctgaaatgaaaataattggacaagtagattcatgacgaatttgacggcaccagtagaaaccatcgaatttcggtaagtttacatcaagtaaaacaagatgtggtttcacagcgttaaacgattccataatatcatcgaaattctctgcaacaacagcttcataaccgtacttctgaatgtgagattgcagtaatgatgaaatatttggatcgtcttcaacgattaaaattttatacatatgtatattcctcctcagaaaaacaattgtagctatagtgtatcatgtgtttcaagtcttttcattatgttgaaagataagctagtaaacagtataggttaaaagtgagaaaagtaaaaagggcctcgtatataattgacaatcaactgaaatcattttaacatttagataagtatctaaatgtctaattatcgaaaggaagaaagacattgaatcaagcattcaaagcattagcagatccaacaaggcgaaaaattttagacttattaaaagaaggtgatctaaccgctggtgagatcgctgaacatttcaatatgacaaaaccaagtatttcacaccacttaaacgcacttaaaaatgctgaacttattcaagatgaaaagaaagggcaattcgttgtgtactctttaaacacaacggtctttcaagatttgttgacttgggtgtttacatttacgaataagggggaagaggggaaatgagaaagcatatatttccgttactattaatagctttaacgattattgcatggtgcatcgcgtggccgcatttaccgggagaggttccgagtcattggaatgtgtctggtgaggtagatgggcgtatgtcaaaaatgggcatgatgattttggatgttgcagttatggtttttatatatgctttattgactttattgcctaagatagatcctaagcatgagaattatgagaaattttctaaagggtataatgtaataaattatagcgtattattcctattatttttagtaagtatcattggaattggagctggattaggttatgacattccaatgaagagtacaccatatattcttgttggtcttttatttataatcatcggaaactatttaccacaatgtaaaccaaattactttgtaggtataaaaacaccgtggacattaagtaacgaggaagtatggagaaagacacaccgttttagtgggaaggtgtttgttgtattaggagttattatgattttaagtatttttgctccggcagcgtggaaaggtttcctaatcattggcattattaccggtgcagtaggattaacaatgggatattcatatattgcttataaaaaagaaataggggcttaataaaaaattatgggggagagaggatgaaaagacacgtattaccatggagtttaattattggcattgtaattggatggtatattgtatggccacatttaccagaacaaattccacgccattataatgcagcaggagtagtagatggatatttttctaaagtagaagcaagttctgtttcaataggaagcatgatgttgctgtatttgatatggctagctcttgggtatattgacgtaacgaaagataagtataaacagcatgctaaagtcctttccgcaatccgttatgctattcttttgataggattcggctgtaacttatttgcgctattagcagcgtctaattatattgcatcgggctcaattgcatttaattttggacttggaacattgtttcttgtactaggtaattacatgcaacaaacgaagccaaacgggttagtaggcattcgaatggactggacattagaaaatcctgtagtttggaggaaaacacatagatttgcttcgagggtatttgtaataggttcactttgtatatatgccggggctttgcttccagatccatttaatatttttatagggattggaatcatattaatatgcattatcgtatcaacaataaagtcatatagtatttataaagaagagttgaaaatgtaaataaagctgcttttccttttagggaagagcagctttgttttttatcacttcttcaaaaccggtatccaaatttcacttttaaagtttggagaagatatatctttctgtttattccacaatatctccggtccttccgctagttcatagttcgaagaagggaaccattcagagtaaatacgtccccatacattttgtaatgcatcaggaaatggaccgacagcttcgaatatagcccatgttgaagcagtaacttcaagctgtttaaactgctctggacaatcctttgttgtggctactccaatgtagtgatcgagttctcccttttcctccattcttccttcagaaaagttagtagaagcactaatgattccagtaggttcaatgtttgaaagggactttaatgtttgaatagaatctgggtttaaacttttccacatagaagcaatttcttcatttacaccgttaaaaacgattggtactcgttttgtaatacctataattcgaaatggctctttttcttcaattcgatagttcatttcatttcctccttgaatggataattggaaggtcattggtgaataagccttcaaagaatggctactatttcgggcttcagaaggtgttataccgtgcaagttttgaaatgcacgagcgaatgaatctggtgagttgtacccatattttatagcgacatcaatgacttttgcatcgctattttttagttcaaaggcagcgagagtaagacgtctacagcgaatataatcagacagtgatatacctgctaaaaacgaaaacattcttttaaagtgatactcagaacagagagctagcctcgcaacttctttaaaatcaatttcattcgtaaggttatcttcaatatagcgcattgcagtattcatatttttaagtgaatccatattatgacctcctctgtacatagaatagcaggaacgaaatagctccatccgacatttcgtgcacaactttgtaggggacatttttaaccttacaaaattgtaatgttcctgtaaggagaatgaatggatggtatgatatcccaatgttatagtaacaaagtacttttgttcagtaggttaaatttttatatctttacttatgcgtcttacataactgtcatgtttgtgtaagaaacatcgatagtggcaagagtagagagtgtatatagttgaaaatagagaatagaagaaatgagggatgtcgagatgaaaacagtgttagaagcaaaaaatattgaaaaagtgtacgacacgggtgggaataaatttgcagcgttaaaaggtattaacttacaagtaaaagaaggtgagttcgttggaattatgggaccttctggttctggtaagacgactttactaaatgttctttctacaattgataatgcgacgaacggtgaaattttaattgatggaaaagatattgtaaagatgaatgatgataagttagcgttattccgccgtgatcatttaggtttcattttccaagattataacttattagatacgttaacggtgaaagagaatatcgctttaccacttgcgttatcaaaggtgaaagcgagtgagattgatcgccgcgttcttgaaatctcaaagaaattcggtattgatcatattttaagtcagttcccatatcaagtatctggtggacagaagcagcgctgtgcagcatcgcgtgcaattgttacgaatccaagtatgattttcggagacgagccaactggagcacttgattctaaatctgcaacagatttacttgaaagtatgaagtcgttaaatgaatatgataactcaacaattttaatggtaacgcacgatgcgtttgcagcaagttattgtaaacgagttattttcattaaagatggtgaactatataaagaattacatcgcggtgaatcgacgcgtaaacagttcttccaaaaaattgttgacgtaatgtcttctatttctggaggtatggctgatgaccttatctagcattgccctccgcaacatacagcggaactttaaagactactttgtatattttgcatctatgatttttagtatcgttatttattttacatttaaagcactgcaatataattcacaaatggaaaaagcagcagaagcttcaaaaaaaattagcggagcgttccaagtttcaagtgtgatgcttatcattttcgtagcagtgttcattatatattcgaacggattctttacacgtaaacgtaaaaaagaagttggcttatattcgttattaggtatccgtaaaagacaaattggtaaaatgctcttttatgaaaatatgttaatgggattaatgtcattagtaattgggattgcgatcggtagtgtcctttcaaaattattccttgagttattagtaaatatgatgggattaaatttaaacgttcattttgaagtaccgatggctgccattattgatacagcaattattttctttgtgattattttatatacatcacttcaaggatatcgtttaatttatcgctttaagttaattgaacttttccgtgcagaacgtgaaggagaagcaatgccaaaaggatctgtcattatggcattaatttcagttttcttaatcggttcaggttattttttagcattaatgtacatgaaagcagttatgtatgcagactttatggtcgttgcattatatattttattagcgacagtagcagggacttatttactgttcatgttcttcacagtatttgtattgaaacgtgcaagaaataataagtcagcattttataatggtatgaatatggtaacgacatcacagttactatatcgtattaaaggaaatgcgaaatcactggcgacaatcgctattttaagtgcggtaacattaacagcggttggtacgtcagttacgatgtattacaacacatttacgcaatcaaaagttgctgcgccgtatagttattcctatgagaaaaaagatgcagcattagataaaaaagtaaatgaaatacttgctggagagaagaataatcacccagtcacatatgaatcagaagttgaaatgattcctgtgaagggaacatttaaaggtgaaagagctgatcaagttctgaacacacactataatgttacgaatcagtaccagcttatttctcaatcaagctttaatacacttgtgaaacatttagatgtagaacctgtaaatttaagtgcgaatgaagctttcgtatatgatagcttatatattgagaaacttgattttggtcctctttatacaggaaatacagctgtattccctgttggaaacgagtcaaaagaattaaaaattaaaggtgtaaataatagaagccttacaaatttaaatgaactatttgtaatcgttcctgataaaacatatgagcaagtgaaacaagtaaatgaaacgcgtactgtaaaaaatattgatgtaaaaggtgagcgaaatagtaaagagttaacagcaaaattagcaagcattatgccagctggagaatcagaagttttaaaaccatttaacgatttctatacaggattccaaatggggcttgaaacaacaggcttaatgatgtttattgggttattcttaggattagtattcctattagcaacaggctcaatcatttactttaaacaattaacagaagcaagtgctgaccgtgatcgctacgttgttcttcataaaattggtgtaacgaagcaagagatgaagagagctatcgcaaaacaagtgagctttatctttgctattccgttagtaattggtattttacacagcctatttgcactaaaaggtttatcaaatatattaccatttgaaattatgattccgcttctaattagtatcggagtatacggcgcgatttatattggatattacttcttaacagttcgttcttattataagatcgtgagtgcgaagtaataagggacagctatcgctagaggcgatagctgtttttttattcttcataaaatcttaagaaatctcctcaatttttgttaagaaataatagttatacttagaaacaagttaaaaactattgaacgaatgaggagaggtttatatgcaactcataacattcttacatgaatttattaaacatccgaaacatactggtgcaattgcgccaagttcaaaaatattagcaaagaaaatggtagatgtaattgattttaataaagcgaaatgcattgtagagttaggtcctggtacgggagtctttacgaaagaaattatgaagagaaagaagaaggaaacaatatttcttcttattgaaattaatgaagtgttttgcaaggaactaaagagaaaatttaaagatgagcagaacgtcattgttgtacacggttcagccgaaaatataaaaaagtatatagaagatctcaatatagaatgcgtggattacgttttatcgggattaccttttacctctttaccagaagaagtttcaaagcgtattttaaacaatgtaatggaagggatacatgagaatggtgaatttattacatttcaatattcacttgtgaaaaaaggatttatacagcacttctttcctgaaattacgctagagaaagtgtggctcaatttcccaccagcgtatgtctttagctgtaaaaaagagctaaggagagcatatgcataatggaattacatgaattattatcttatattgaacaatacggttattgggcattatttttctgtttatggttaggtattattggtatgccaattccagacgaaatgatcgtaatgagtggtggctttgtatcttcactagggatattaagtgtcattcctgcatttttattaacatatttaggtgttgtatctgggctttctttaggttatatattagggaaaatatttggtacgaaagtacttgataagctaatgaaaaagaaaaaggcgaaatatcttttgaaatctcaacaaatggtagagaagtatggtcattatgcgttagtcacaagttacttcataccagttgtaagacatatcgtaccgtatttagttggaatgaataacatgccatttaagacgtatgctttgtattcttatacgacaggatttgtttggacactcgtttactttgtgctcggtgctttatttggacaacacattgaaagtattgtagcgattgcgatagaatatggcttgtattttggcgtgattgtttttattgttacaggtattctttatttatatagacaaaaaagaatcacactgatgagtaaatagaagtaaagaaagtttcttccagtatgaaggaaaagataggattataagtataaaattatctttatttaatggtaaaatataggtaagtagttaagggaggaagagcgttgtgctactcatttttagccttatcttaattggaattatgtgcagtatgaaaatagtatctttacacatgatagaacgacaaaaggtagaggaatgatatgtatattgtccaaaatgtgatacaaaaattagaagaggaaattcagctcctttttgttcgaaatgtaatttaatatttttaagtaaacattaatccacctagttctctttcgtttgcttattagctaaaatggattatgaataacaatagtatgtaaacgaaaataaatataaatgtacacatggagtgttatatttggagattttaatcatagtaggatgcctaaactgtatggatgttaacctttttagagaaagatatcccagctaatttagtttggaagattgaaagaatagattgaaaatagatgagaagtggagtgcatatgatggagacacaaatcgttattggagtacctggtttatggaaagatagaacagaattaatacaagaagttgtgaataaaagtaactatatattagcgggaaatgttatgcaccataaggagaaagagattggctttgaaattgatatatatgaacaagggattgagtatacgaatattattgaaggatatcccattattatgaagtctttcgtagagatggattgagaagttttgagggttttattacctgatgacagggggattcttcctactaggccagagtgtgatgaatgttataagactcaattggatagtattgaggaaatttgataaaaaatagcttgaaaccatttaagctatttttgaattattacatatgctgtaaagtaggttttcgatttgtagtaatatctgctactgaataacgcttcgttttattagtgccagttagcccatttcgtatttagcatatttttttcttcttctgaaattatattgtctttataccagggtaaatgtttacaggtgaaattatcagctacccttacggcattataaaaaccgttactaataaattttttattgtaaacagcaaaagttgtatcaattccagcgttgaaaactttaggtttattgtatttagttataggaaaaagccaatactgcatttcccattctgttactgtacatttttcatttgacatgagctctctgttgaaattagaagtaggtataatgtctaaagcaaggccggctttaaagagtgaaagctcgattgttaactgctttaaatactctaaaaagttatctgacattttttcattaaaagataaatcaggatcagttacagcaaaaaaatctggaagtaaatcgaaaatataaggaacggcaaaaaaacgtggtccatagttggcattatttttcactaaattatatttagttgatatttgctcataaaaagcaagcaaagcgggagcggttgaattattgtcccaaatccatatatcttcactttttatctttttgttttctaattgttttaacatatttttcacataagtaaggttattgaaggctattactattataggaatgtttgaattatattttaagttttctatattagagagacttagttcgttcttacattcgaacacgatttataacacctccgagcaaaaataaaacacactgcattagaagcaacaatattccaatatatgcgtaagtaagagaaatggaatcggtgtacggcctatatatgatggaagtaggaaaagcatttttgttaagatagattgagtatacgaatagtgatgaaagaggaatttttctagctacatgagagcacggtaaacgttagataatattaatgaaaaggtgatacatgtgcaaaaagagattttaaggttattagataaaaagcaaagtaactatgaatttcctgcctttgataatgaatatatggatatttcacaagtgaaattctctcttttctttaaagatgctaaggattggctaatggtgtttcaaattgtgggtgtaggttcattaggtgtatgtaatgatattcaagtatatggcgatagaattactcattcaatgggtgatgattgcattttacaattaaataatggcgattatgagttgtttgatgatgaaggtgaatttataccgaatatttataacggcagtttaaaaattcgcgagcatcattttgaatatgaatttacagaagaggattatataaataatggaatagaagtacaaacgacagagcattatccaacatactttatgcgtatgctcgctactaatgaggaagctcaaaaattattgtggtgggataaaggagaaattttagaagagttcggtttagaaggcgactgggaagtagcgtatgaaacggaagaatggaaacatgttgaagacgaaaaagtaagtgaaaatgaattcttccaatcagtagccgctgcaatagagaagaaagatccaagtgttattgtgaatgaaaatgctaatacgcattggagaaattgggtagagtttgattgtgactgaaaaggataggagaaagaatgacaaatgaaaagaagaagaaaatccggagaaaaagtacaaatgcatcgttttgcactacctctatgctacggaagtgaagcaccatattattattacgaggtagcgccccatgaaagagaggaacgcttccatttaacatcagatctttgtgtaatggatggtgaacattattttattagaggatgtttagagattcctataattgactaccacaaaaatttcatatggactgtgtgggtatcacttagtaaagaaagttgtgatgaagtattagaaaagtgggatgaaagaggcagggaaaatagtgatctttattttggatggttatctgtagagataccagtttatccagaaacattaaatttaaaaacaaatgtacatataagagaagtaggaacggcaccgtatgttgaattagagccaaccgaccatcctttagcgatcgaacaaagaaatggaattactttagagagagttaaagaaatagaggaaatgatccaacaatataactagattagaagagaaaaaacgagtgctagcactcgtttttttattacacaaccgcaggattataaatcatcgtaaagtgtcctggtaataattcaatgtgacaaggtgtatgaagcgagttttctccatctgtatctacttctttttcttctttcgtttcaatatgaatggatttcgcttttacgtggaagatgtcattttcatttgagtcttcaaatagtttctttccgatgtaatctttaaatgcttgaatacctgttgatttgactacgaaaatatcaagtgttccgtcatcacattttacgttcggaataaaggatggaataccaccaagatattcaccatttccaaccatgacaaggacagcttcgtcttcatatacttgtccgtcataagtaatttttactgggaatgtttcagcattttttacagttcgaattgtgcttaaatagtaaccgattttaccaagctttgctttttcttctgcatcgatattgtttgatacttcagatacgagtccaatgccccagaagtttaagaaatgttgttcatttgcttttgcaacgtcaactggttttatatgttcttttgtaataagttttgccgcttctgcaatgttttgcggaacaccaagtgtgcgagagaagtcgttgcaagttccacctggaatgattgcaagtgtaggtctagtttcgagaggtgctaagccatttgtgcattcaaatactgttccatcaccaccaaagacgataattaaatctactttactagcaaactcttggcaatattttgttgcatcaccttgttttttcgtatgaaggatatgtagatcaggaaaagctgcggcaagaggtggtacgattttcgttaaatttgtatgtaagtcaccttgaccagctttcggatttacgatgaggagtactttttcaaattttgtctttgtcatatttcatctctccctgtagtttgtaatggaaagaaaggagctgttcccatgtattttagaacagcttctccctattaattgggtgctaagattgtcagttattgtcggtaagtcgatatattaaaaaaatcgccgatatacattttatgtactatcgattttttaagttatacgattattccgttacaactgaagcaatgaatggtaagttacgatatttttccgcacagtcgataccgtatccaacgatgaattcgtctggaatttggaagccaacatattcagctgttaagtctactttacgacgttctggcttatcaagtaatgtacagaacttgagtgcttttggtttatgcataaagaagtggtcttttaggaaatgaagtgttaaaccagaatcgataatatcttctacaacaattacgtttttcccagtaatgtttacgtcgatatcttttagtagtttcacttttcctgttgtttctgtttgatttccgtagctagatgcagaaataaagtcaattgttacatcatttttgatgttacgaattaaatcagcagcaaatacgaatgaaccttttaatactgcgataactacgatttcttctccttcaaagtcacgttcgatttgaagtgctaattctttaacttttgcttgtaattgttcttcagaaattaaagtgtcttttatttcaatattcattgtaatcctcctacagtgtaaaacttacgaacatttcgactgtaaaggatagaatagaaaaagtcaaaggagatagtaattttttacaaagataacgacaaaatcatctgatgatatgatatactaagtatattaagaaaacgcttccataaagggtgaatatgatgaagaagaaacagtacacaagtgtaacatttataaaagcattacttttaacaattgttcttggcctgttggcttacgtaattgatgtacctgtgattcgtatttcattaattggaatgactttagtgttaggagcaatttcgcatggtatgatgtcgcagctaaaagaagctggacttgatgatatgagagatcatatagataaaaagtgagaaaccttcattatatagagtgaaggtttttttgtttcttacaaaaatgtaaggtagttgtaaggcaaatcgatagttgcataagagcattttggataaactatgggtgtaaggtaaaaggcaagcatattttaggtaaattaagttttaggcactctatatgtgaaaaaggagtaggagggcatggagaaacgttggacgaccttttcttttttagcgactagtaacaccgtaatgctagatggaaaaatggattttttgcacttgtttgatcgtgaagatgatcattcttcttctaaatttacaatgaaatggaataaatggagcgagagttgtaggtttgaagaagaggcccctaacgaagagcaaaagattattttaacaaaccctattaaagcgtgggttgttcaacgtcgtaagtgtaacgtcaaaaatcacttcaagaaaactgagccgagacaattagttatcgctccggcccgttctacttccaaatcacgcgaaagtaacatgtaaataattgagacacacacccgaaaaaaacatcgtacatattgcgatgtttttttctttttctacaatgaaatctttaaatgaaatatatttcatctgcatcttatatttatatctcttgcttattctagtaatacatccgatgcgagtagatgtgaataaaatataaggagagagtgaaaatgaaaaagaaactattaccaatttgtgcaatggcacttttaacagtaggatattcttcagtagcgagtgcggatactggaacagtaacaaaggaagaagaagcgcaagtacaacaggataaagctaaaaaagaagaagcaatcaaggaacagcaaaaaagtgaaatagagaaaaagcaagcagcacaagtacaagaaaaaaatgatatggctaaaaaagaggaaacaataaaagctgagaaaaaaagtgaagaagagaaaaagagaatagcgcaagaacagttaaaaaacgatatggctaaaaaagaagcagcgataaaagccgagcaaaagaatgaagtagctaaaaaagaagaagcaaagccagttgtacaaggtgaaaaattaccaaatacagcatcaaataatgtagcaatgatgggattaagtgcatgtcttgtagcggtaggtacattatttggtttgaatcgtcgcaataagattaaagcgtaaataaaatattttcctataaagaatgggataatttcatatattaaaaatggtaggttactcctaccatttttggcatggaggaatgaagaatgaagttactcaattatatcggtatcatattgatggctatagggctattcatgggatcctattatgctgtggaatggtataaaggaagaagctctgccgggcaattaacggcagaagaaataaagagccttaaaaatatacaagatactcaactttctcatgaaacacctgtaacttctcaagtgccttcttctcaaacagaacataaagaaggagaaaaggtagcgatgttaaacataccgaaaataaagaagaagttttctatatattggggagcagatgatacgactttgaaaaaaggagtgggtatgttcgttagtgatttaacgacaactccatctggagggggacatactgtactgagtggacatcgagatactgtatttacagatttagaagagttgaaagaaaaggatacccttgttttagagtatgataataaaacgtacacatatgaaattcaaaagacatggattactcatgcggatgatcgtactgttattataaaaaaagaagaaccgatattaacactgacaacttgttacccatttgattatataggggatgcaccagatagatatattatcgaggcgaagttaactggcagttattcaaagtgaaattatagtttctgaaagcgagagggggatatataagttatgtcaaaaaacattttaattgttgaagatgaagacatattacgcgaaatattaaaagattattttttaagtgaacaatatgtagtgtttgaagcgagggacgggaaagaggctttagttgtatttgaagaagaagaggttgatttagttattttagatatcatgttgccagaactcgatggatggtctgtttgccgaaggattaggaagacgtccgaggtgcctattattatgctgacggcgcgtgtagatgaagacgatacgttacttggttttgaacttggagcagatgactatgtgacgaagccgtatagtcctccaattttattagcaagagcgaaacgattattagaaagtagaaaagcatcgaagaaacctttagagaacgaagatgatacgttatcgattcatggcatccatgtccattttccgtcgcgtactgttactgttgatgaggcagatgttagtttaacgcatacggagtttgaaatattggtgtatttcatgaaaaatcaaggaatcgttttaacgcgagagcaactcatttcaagaatttggggatatgaatttgctggcgatgatcgaacggtgaatagccatattcgtaatttaagaaataaattaggagagaaagcaaagtatattacaactgtagtacgaactggttataaatttgaggggaatgtatgaagaaaggaattgtactaaaattatttactcttacaacagcattatgtatgttgattttagcgacgatatttattggacaaacgatattttttaaacaatattatgcgaatcgaaaagtggaagatattaaagtgaatttaaattcttttgagaagaattatttaaattatgcaggaaatgcagaagaaattcagaaactagagcaagactttttaagagaaaataatacgtggattacgacattagataagaacgggaatttaaaacatgcagatgatttttattttgaagtaacgatagatcgtaggcaacaaaagagctttggacaacaaatatttaaaattcccttaggtaatctcgtcaatatagaggaaattgataataaattatcagagcagtttttagggcaagaaatttatttttctggagtgagaaaagaagatagttttattccattctctttttctttatctaagcagaatttaagtggatctaataaaccgttagaaaaagcatttaatgagaaaatgagcaaattaaatgaggagaaaaagagagcagttgaggaacaacttgttaaggaaaagaaaccagctgttcaggagcaagctgctcaggaattaggcgtttacataggaggacgtgttacaaaagtacagttaccagatgtaaaaggtcctgtgaatccaatttataaaaatggcatcttcttagatagcataaaagaatttcaaactaatttattattaaaagagagcaagcccatacaatatacaacacaaacaatggactatgaaaaaaatgatattaaatataaattattaatcaagccaatagaaaaagacggatcagtaacatatatttatgcgatggcttctttacagcccgtagatgaagctgtacaaatggtgcaagattattacatctatatcattgcatttgtagtcgttcttattttgttagcttcgttctattactcaaaacaaattgccaaaccgttattaaaaataaatgatacgacgaagaaaatagcacaattagattttacagaaaaaataccgattacttcaaaagatgaaattggagatttgtcgaaaaatattaatgtgctatcaaataaactccattcacatattggacagttagaagaagatattgaaaaggaaagaaagttagaaaatacacggaaagaattcatttctggtgtttcgcatgaattaaaaacaccgctaagtattatgaaaagttgtatttccattttaaaagacggggtagctgagcataaaaaagagtattattttcaagcgatggagagagaagtagacaaaatggatactttaattttggatatgcttgagctagctaaatttgaatctggtacatataaaatgaaaaagtctgcgttttatattgatacagtaattgaagatatatgtgaacatctatctgtggaaatagagaaaaaagaacttcatgttcataaaaatatacattcatttgaagtgattgcaaatcaaggccggattgaacaagtcatcgttaacttcattacgaatgccatacgttatacaccaaataaagaagatattattatttctgcaatagatgagaaggatcgtataaaagtttgtattgaaaataaaggtactcacattgaagaagaacaattagataaaatttgggatcgtttttatcgcgtggatacagctcgtcagcgttcacaaggtgggacgggactggggcttgctatttctaaaaatattttagaattacacgatgctgaatatggagtgaaaaatacagaagacggtgtattattttacttttacttaccgaaaaaagcgtagataatgcatgctacgctttttttaatttattttcatattatctttacctaatctttatttttaagcgatataatctggttagaaaatgaggttatgtaaggagtcgatgaaccgtgcatagcaattggctaagtataatggtatttattttcttttgcgcatttattgtatttttaattaatattacgatatgaaaaaagagcgctcattaagcgccctttttttgtgtattcatttgataagcactgatgcttttgaataagcgtggggaagtgaggaataaaaatataagtaaaactgtacataaaataaaagaaccaagcattgtacttccatttacgattaatgaatataacacagctgattgacctttcggcgcatattgtccccagaaaataataccggcaataaagtgacagaaatagcgagcaaagctaccgacaaatgtagcaaggataatgtaaacaaggattttcttaccatggttttgttttgctgaaggtttttcattgcgactacctaaacttgaatgttcttcactattttcattagacgttaaaagtgctttttgaattggacgatagaataagccagcaaatccgataaaagcaaaggcaatgaagtactcaatgaatgcttgaacaggtgttaaaatataagcatcccccacgactatttgtaatagtccccaaactaaaccacctaagaaagctgatttaaagccccagcggtaagcgataataaaaataggaatcatagcgaatgagatagaaccgcctgttggaagtttaagtgataatggtaaaatatcgataatcatggcgaaggctgcaagaatagcagattcgatcatcgcttgtaaattagtgttacgcatgttgtctccccctaaatccaagttgtacaaaaaagaatagatatcataggaggatacgaaatacgtaaataaaaatgaggtatgtatttcggacgtttgcacaatccctgcgttagcattaactaacaggttcgaagggtcggaacgaagtgttccctctcagcggcatggctcccccagtgataacgagattctttatttgctattgtttattgtaagcgaaatggatgagaatggcaaacgaatacagtatgacaataattgaaatagaattgtagcgaaatgttaataaatatgaagcaaaagggtatagtacaagagaaattgggtgtggtataatttttttgaaaataattatcattctcttctgagggggaaggttatgagtttagtagatattaaaattggagagaaagtgttagtaaaaagtattcagtctttagatcagctattaaagcgtagactagctgctttcggtcttgctgaaggaagcgaacttcgcctgaaacagaaagcgatgtttaaaggtccttgtacattggagtgtcgtggacagttaattagtattcgtcattgtgacgcgaaaatgataaaggtggaattagcgtgaataaggtagctttgctagggaatccgaatacagggaagacatcattatttaatgcacttactggttcttatgagtatgtaggaaactggagcggtgtaacagtagaaaagaaggttggtaaattaaaagatagacaaggaacattaattgatttaccaggtgtttatgatttaaatccagtttcacgtgatgaaggtgttgtaacaaactttctattaacagaagaatttaatcatatgttaaatatcgtagattcctcgcagtttgaaagaaatatgcatttaacgttgcagttacttgaatttggtaagccagtctcaattggtttaaacatggttgatgtggcgaagcaaagaggaattgtcattgatgtaaaacgattatcagaactattaggtgtaacagtcgttcctgttgttgcaaggagtggaaaaggctgtgaagaactgcttacgactcttaaagaaaatgacaaaaaagagaaaaagccattccttatttcatatggtgtacaaatggatgaaggaattggagaagtaattgctcttttagagacagtgaattacgagcatccgagatggttagcacttcaatttttaagcaataacgaagtagtagaaaaagaaatgaaagcattaccaatttataaggaactcatagccattcgatctcgcttagaaggaaaacttgattgtacgttagaagagcacatttacaaaactcgtgaagcgtatattgaaaagttaaaaacaaatgttatgaagcatgagaaagaaggaaaaattcctttttcagaaaaaattgatagattaattacacataaaattttaggacttccaatctttttagcagttatgttttttatttttcaggttacgtttacgtggattggtacacctttatctgatatgttagatgagttttttggtggccagcttacggattgggtgacggctggacttacaagtattggagcttctcattttattcaagcactcgttacagaaggtattattgccggtgttggtgctgtattagtattcgtaccacaaatctttgcactattctttttcatttcattattagaagactcagggtatatggcgcgaattgcagttgttatggatagaattatggagtttttcggcttaaacggaaaagcttttattccgatgattatcggttttggatgtaacgttccaggtattatggctgcgagaacgattgaacaggagaaagaacgtttacttaccattttagtaacaccatttatgtcttgttcagcacgattacctgtatatgcattatttgcgggcgtattcttcccgcatagtcaggcgactgttgtattttctttatatgttgcagggattgttcttgcgttattagttacaaaaattatgtctcttacgattttgaaagcggaaaagtctattttcgtaattgaattaccgccttaccgtgtgccacaagcgaaaacattatggctgagcacgtgggagaaaggaaaaggatttgttcgtaaagctggtacattcatctttggtggttcggttgtcatttggttattaaactatgcaggtccatcaggatttggtgttgatatgggagacagttacttagcgatgattggtggatttatcgcaccgctattcgcaccgctcggctttggaacgtggcaagctgcagcatcccttttaacaggatttttagcgaaggaagttgtcgtttctacaatggcaattatttatgcagttaaagaagatgtgcttggaaatgtaatgggagtacattatacagcattatcagcttatgcatttatgttctttattttattatatgttccgtgtttagcgacggtagctgttattaaacgtgaaacaggatcagcgaaatggacgattttctcagtcgtttatccactcgtagttgcttatgtattaacgctcattatatatcaagttggatccttactcggattctagaaggagatgtattacgatgatggtcaatattataattggagctatcatttttggttatgcagcatacacgttagttaattttgtaaagagaagtaaaaagggaaaatgcgcagcatgttctttaaataagtcatgtcagtcgaaaacttgtagtccagatatggaacaagttgctcataataaatagaaaaaagctttgcgaatgtcgcaaagcttttttgttttactttttaatttttacaagttgagaagcttcgacgccgttgtaaccagggaattctttacttgggtctttatcaaattttaatacacctacagatttttcatcaccttttacattgttgtaagttgcgtcatcgacaatcgcatacatatctgtatatgcacggccacttccgataattgtgttgccttcatattttaatttcgctccatcaagtgtagcattttttactttttcttttgcaaataatacaccttgttctgttgttatagctggtaatttatcaagtggtttcgtgttgtctttttcatcaactttgctaagtaactcttttttcactagttcctcaccagttttcttatccattacaagaacttttttaccatctaatgttgtcattttcattttatagaagtctttttctttcacttcttttttgtttttatctgtaatttgctgaacttgttcttctgagccgtacagtacaaaaccgttcgctttctctcctaataaagaacaacctgataatgctccaagtgaaattgctgctgctaatccgattcctactaattttttcatgatgatttctccttttatatgttttatattaaatacaatttttgtattattgcttacaagtgaagaagcttgtttgttgcttctggtattagtgtataagaaatattagaatgcaactatcgagttagcttacagtaacattacacttatgtaatttagtgaaattgcacaaaagtaagttaatttcaaagaggaataatgagaatatattagaaatacaatattgtatatagaatgtcatattataatggatgtattttggaaataacatgtaaggacatattagttttgttataataaacacataggctgtaaaaatgaatattctttactgtaaagggagatttttcagttttccaagtagtgaatttgaaatatgaggtatatcataggaggaatttagatgtctgtatttaaacgattaagagatttaacaatgtcaaatgtgtattcgttaattgagaaagcggaagatccagttaagatgacggatcaatatttacgcgatatgcaagcggatgtacaagaagctgagaaaagtgtagcagctcaaatcgcgcttgagaagaaattcaaaatattatttgaagagcaagaagcacttgtgaaaaaacgtgaagagcaagctcatatggctgttcaagctaataacttagatcttgcgcgccgtgcactagaagaaaaacaaaatgcggagcaaaagatgaatgagtataaagcaagctatgagcaaaataaagctgctgctgataacctgcgcctaaagctagaagaaatgcgtaagcaattaaatgagctgaaaaataaacgtgagacacttgtagcgcgtgtaaatgcggcgaaagcacaaaagaatattaatcaggcgatgtctggatttgattcaaactcagcaaaagctggtttaagccgtatggaagagaaagctcttcaattagaggctgaagcagaagcgagcggtgaagtttataagaaagaaaaatcattagatgatgaattcgcaagcttaaacaaaaattctgctgttgacgatgaattagctcgtattatgaagcagtatgagaaataatatagaatagagacaaatgaaccgacatgtctaaatatattcatgtcggttttctattatatttagaggaggttttgcaatgacatggacaaatgtattagccatgcttgtatggactggagcgagtgcagtacttttatttgcaattatgtgggttgattcaatttttacaaaatacaatgatttaaaagaaatcaaaaatggaaatacagctgtaacaactcgttttattatgaaattatttgcacaagggtacattttatctcaatcaattacgaaagcaaatgacttatggcaagcacttcttgcatcagcagtttctttcgttattttattagtggtagaaatgtttatcgaattcgtattaaagaaaatgtctggtcttgatttagaagaaggtacgaaagaaggcagcgttgcacatgcgatgttagctggatcattacatattgttggtgcacttattttaggtgcttgtttataaagagaaaaggaggggtaaatcatgagtttatttaaacgaattaaaaatataatgaaaagcccagagccaccgaagccggaaaagagtcttttaacgttagctcctggcgatatgattgaagtgtcattagttatgtatgaattaattgggaaaacgagtatgcattcgcgtaaggaaattgttttgacattgcaagatggaaaagacattcgttatttaaaaattgaagatcgtgaaaatacgtattacaaattatatacaccaattgatggtcgcttagattcaattgatgaaattccgacgacaattgaaatggatgataccgagtaccatatggaagaacaatataacggacgtgttgttgtgatgggaaaaactccattctcagcttcagaagaacagtacgtatgggaattccaatcagacaatcgaaaattattgcgtattgaatggcaaaatggtcgcacaatgatgtatgagggagaagcaatcattcctgctgatgtacaaattataagagcaacgtaagggggcgtaatcatgtcaaaccgattgtttaccatgattaaatcgtttgtaatccctatacttgctatcgttatattacttgttgttgctggttatgccttatcaggttgtcaaggcgggcagacaaagtcgattcaagaccgttatccacttgaatctgttgccaaggaaggtaaacaagaatcttacgtgtatagggccgccaatcggtcagttcctgaagtagcgaaggaactcattaacgaaagagaaccgaagcaagcatctaaagaagacgaaaatcaaatgttcctcgtttattctgataagatttataacctgcaaaaggataaagagaaaccatctgatacgttaattgaaataagtaataaagaatttgtccgtcaaaattaccaaccgtccttcttgcaaggatatattatgggtagcatattaaacgatatattcggttcaaaaagatcatcatccggtgattaccgaggatataatgacagacaaaatcatcaaccagttattccagaaagaccacctacaaaagaagaaaagaaaaccccacctccaattacgaaggaagggaaagggtctatcattaagcgaggcgataatgtagattcgaaaccatcagtaggtgataagggaagtattactgaaaaaggaagtaatacgacgcccccaccttctactggaagcaaggggaaaattacgaaaacaccaggcggttcaagcggatcagatgtgaagccaaaatcatctattaaaacgccgccaaggaatacatctcctccgaaaacgagggtcggtggttcaggaaagattacgaagagaagatagtgtagaggccaaaaagtggaatttgctttttggtcttttttcgtgttatgggaattaatccctttcagttggtacgatttaggcataagggggcgagtaaaaatatatcagcgattattagaatatatcgaccacaactcaaaatatatcagcgattattgaaatatatcgacttaccgacaaaaactgacaacgatagcaacttaataataaaaagagggtgtgccaaaattttggcacaccctcttttatataacgattaatgaatatcacgtttcttgaaattaccgccttttacttctgctacgtcataaactgtaataaaggcgtgtggatcgatttcattaataagttctttcattttactttcttctaaacggttaattacgcaagaaatttctttgaatttctctcttgaataaccaccgtatacttcgttatatgttgcacttcggcctaaacgatcgcgaattgtttctaccattaattcaggctcttttgtaataattttaaatgcttttgaaccacttaaaccaacttcaacgatatgaatcactttcgaagcgataaagtaagcaattgccgaaaggatagctccttgaagaccgaataccgttgatacgaaaataaatacgaacatgtttaagaataaaataaggtcactcgttccaaatggtaacttacgagaaagcaatacagcaagcatatcgatcccatctaatgccccaccgttacgtaatgctagtcccataccaaaaccgatgataataccaccaacaactgtaactaataatgtatcgccttcaataatagctggtattccgtgcatgacaacggtacctactgctaatgaagcaattccgataatagaataaatcgcaaagcttttaccgatttgcttataccctaaccaaacgaaaggaatgttaataactgcgattagagctcctaatggcaatccaaataatcttgaactaacgatacttaaaccagtcacaccaccgtctgatacgttatttggaattaatactgcttctaatccgtacgctgtgataaatgccccaataataatcatcaaagcttttgaagcaatttttagcttattgggcttgtttttgataattttctccatataatttcctcgtttcaaactagtttcttatttgttacgtaattcacacctaaattttattttaacatttaatttgaaaaaattctcctttaatggatgtatgcagggaatattatcaccatattatctttaaaatatttttgaaatcagtataagaaatcccatcctttcaaaggatgggatgctattaagaaaatataaaactaagtactgatacgaataaagcgaaacctaaaatagttccacatattttcatatggcgcttacgtcccattacgacaatcgcaacatattcgcgaatcattgcgttaggccagtaataaaatgcagtttttgacccgattccttggctattaagaccagcttgtctagcgtatatgccagcgcggaaaaggtggaaattatttgtggtaaaaatacttttatatttaccttcaggttttaaagaatccataatttctttagagaacaacatattttgatatgtgtttacagagcgattttcttgcaccgtatgttcaagaggaattcctttttcaacagcataattttgcattgcttctgcctctggaagaccttcatctggaccttgaccaccagagaaaataattgttggtggtgtatttacagctgcttgtttccaatagaagtcgatagctttattaatgcggcttgcaagtaatggtggtactttatcattaattaagccgctaccaagaacgataatgaaatcttgattacgtcttggtctgttgaattggtataaaaaatatgcgcttaagaagttagataagtgtataaagaaatagaagcttataagagaaatagctgcaaaaataggctctaaatgcgatgagaccaaacttgctgggtttataatagggagtaacataaagaataacatccctaaagcagcaaggagtgttaaacagttagtgaaccgtcttccttctcgcttcattaaaattctagcattaagaaatagcccaaacattaaagcaacaataccgaaaggaagcataataagaagtgctaaaataggtaaaattataatatagcgtaggacatcactacttgaatttacagatataatcacacaaaaaagaaggaaaaaacagacaaaggaattaaataaaaagccgtttattatttttcgcggatcttttaaatatgagataagaaaaataataaataatataagaggaataattccgaaatacatcataaatatagtacacctcaatttgtataagaatttgacataccttttatattacatgattttataagtgaaaatgaaagaaaaaggattttgaattttctcaataaaatatatggatacatatgttacaatatattcaaagcgatatattaaaagtaaaatggttgaaaaggcactcaatagagtgctttttctttttgtatgcaattgtgcatattatattttttttcaaatgaagaggattacaatataatttgtagacagactttataaagcagaatttaatacaaacatttccctctactttttgtatctaacaatcgtataacaataaataattctgttttatagtgtctgtttttgaaaggtgtcttttttgaaggcacctttttttattagtatagatagttttcactgttagcatagtgtaaactatctatactaaacattagcaatcttccgtataaatattatcaatttactatatattccagtggtgttaacctacatatgaaaggctttctttttcaaaatattacccctaataaaattttgaagaagtcaactgtctccaaacttgtctttatgcttaaagaaaaagcactcaaattgagtgctttttcttattgaaacatgctatttttctaggcgattttcataaaataaaagtaaagaaatgaaagtgggtgacaaaatgccggcagttgtggaaggtgttattattgaaaactgcaatggaacaattaatgtaggggataaatataacgtacagccgattgaaaagacgaaagcttataatggatcgggatcatcaaatacaggaatgaaagtacaaacgtttagcgggattagtacggcggatgtaagggataatgatgcgtatgatcaagttattcaatcaacgttataattttaaaatgcaaaattgcataaagtaacatgtttgttgtatgttacactctagctgtgagctgttaatgattcttctgtattatagttgttagattagaaatataacatcttatcgaaaatcatacgtacaaaaaaagacacttcaaacgaagtgtctttttttactttagtgataccctttagcagagtctttatgaattttatttttaaaaatactgtagctccaaagctgatatccaataacgattggtaccataaccattgcaacgaagaacataatttttaagtttaattgactaccagctgcgttatataacgttgtactgtatgcatcgttaatacgagatggtaacattcttgggaacatacctgcaaagccagttgtcataaacattgcgattgttaggcaaacgaatgtgaatgcaaggccaattttatgtttgtacaccataataagtgcgagtacactcattagcattgcaagtactggaagaatgaatagtaccggatattccgtaaagttttggaataagtttgtccgattagcagttgctacatagaagatagctaaaataatagcagctgccattgaaaatggtcttgcgattttataagcacgatcagatacttcaccagtcgttttaatcatgacccaaagggcaccggatacgacaaatatagcagtgaagaaaagaccacctaatataccgtaatggtttagtaagctaagtaaatttccttcatagccattttttccgatttgtagtccgtaataaagattagcgaatgtaacaccgaataagaaggcgattaggaaactgccaattgcaaatgcccatttacaagttttttgccaaattggtgaatcatctttatgcatgaattccagtccagcggcacgagcaaatagtgcaagtaatactaagaataacggtgtatataaataactaaacatattagcatatgtgactgggaaggcagcaaatgttgcgccaccagctgtaattaaccatacttcattaccgccccagaacgggccaattgcttcttgtaattgatttcgttcttgtcgatctttcgtaacgaaaggaaaaatcattccgttaccaagtgcatacccgtcaagaatgaagtaaactgtccaaatcacgccccataaaccgaaccagatgattgcaagcatatcatgagacatgagctacacctccctcagtagcaggttcttctaatgcggcaggtccttttttcgcgaacttcagcattaagtatacgtctgcgattaaaagtaaagtgtagaataaaattaaactaattaatgagaaccaaatttgcgggacagatataggtgatacagattctgctgtacgcattagtttatatactgtccatggttgacgacctacttcagcgacaatccatcctgcgttaattgcgatataaggaagtaagacagaccatattgtaattttcaaataacgttttgagttttctagttttccttttcggtttaaatagaagccataccaagttaatgccataaagaacatgccgagtgcaaccattaagcggaagctataatacacgaggttaacatttggacgttcatctttcggaatatcttttaaaccaacaatttcgccattaaatgaatttgtgtagaagaagcttccgagttttggaatcgtaaggaattcaaagttcttctcattttttacatcaggaatttgaacaattgagaagccttgtccttttccagtttcccaaactgcttccatcgcagcaccttttgcgggttgatatttagctgctgatacaccagattgatgtcccataaacggtgtaattgttgcggcgaataagcctaacattaaaccaaacttaaatgattttttgaagaattctacttcatttttacgtaataagtgataagcactaattgccataacgaagaaagcacctacgatataacaaccaactacagtatggaagaacatgttccaagcgtatggattcgtaacgagtgcccagaaatcatttaattcagcgcggccgttacgcacgacgtatccaacagggttttgcataaagccgtttgctgtaataatccaaagggcggaaatgtttgttccaagtgcaaccatccacatacagaaggcacggaactttggtgaaattttgtctttaccgaataaccatattcccatgaaagtagattctaagaagaaggcaacgagtgcttcgattgcgagaggggatccgaaaatgtctcccatatatttggagtactcagaccagtttgttccaaattggaattccatcgtaatcccggttataatccccattacgaagttaattgtaaataatttaccccagaaatttgccattttacggtatgttggattcaatgtgcgggcgtattgagtttccatacatgctactaaaatgacaagtccgattgtcaaaggtacaaataaaaagtgataaaaaatagtaattgcaaattgaaaacgactcagtaacagaacgtcggacataataaatattcactccttttttacattatctacaatcagtttatagtgaaaatacgtttaaagtatgtgaaacttgttacaaagatgtgtgtatattttgaaagaattatgtcgattatctgaaaatatcttatttttactataaagcgatatcctttttgagtttttcatattttggtacactatttatgtagtgtaaacgagagaaaagagggtcctttactatgaagtcattagaagagattttgcagtacaatgagaaatttgttgaagagaaaaaatatgaagagtttgtagcggggaaatttccaaacaaaaaaatggtaattatttcttgtatggatacacgacttgttgaactattaccaaaagcgatgaatatgcgtaacggtgatgtgaaaattattaaagtagcaggcgctgttatttcacatccatttggaagtattatgcgtagtattttagtcgctgtatacgaacttggcgctgatgaagtatgtgtagttggtcaccatgattgtggtatggcaaaaattcaagcaagtagtacgattgagagaatgaaagaacgcggtataacagaagagaaattagatatgcttcgttattctggaatcgatttagaacaattcttgcgcggtttctctagtgtggaagaaagtgtagaacatagcgtatcagtacttcgcaaccacccattacttccggaagaagtacctgttcacggtcttgttatagatcctgatacaggaaaattagatttagttgtgaatggttacgacaattaagaatttactttgtcatcctttttatctgggacaggatcaaatcctcccgggtggaaagggtgacattttaatatacgcttacaagtaagccaaaagcctttgaatgcaccatgtttttgaaacgcttctaatccataatgagaacaagttggataaaaacggcatgttggtggtgtcatcggagaaatgaacttttgataaaagcgtataatcccaataaaaatctgtttcataacggtctccttttcagcatattcttaaagtattatagcacgactgtacataatactttactaatgtgcatttccgttatatcatattggatataacggaattaaattaaaagcgggagagatgttgtatgccatcagtagaaagctttgaattagatcatacgattgtaaaggcaccttatgtaagacattgcggagttcacaatgtaggtagtgacggtattgtaaataaattcgatattcgtttctgccaaccgaataaacaagcaatgaaaccagatgttattcatacgttagagcatttattagcatttaatttacgtaaatatattgatcgttatccgcactttgatattatcgatatttcaccgatgggctgccaaacaggatattatcttgtagtaagcggaacaccgacagtacgagaaatcattgatttattagaactaacattaaaagatgcggttcaaattacagaaattccggctgcaaatgaaacgcaatgtggtcaagcgaagcttcacgacttagaaggagcacaacgcttaatgaacttctggttaagccaagataaagatgaacttgagaaagtttttggataaaaagaaaaactgcctgtgaaagggcagtttttttattgtgctaagagcgactatactcttcttttgtatgaaaatatattagatactccaacatataaaataaaggcagaacagagaaaataaacaaatgctttcgctttttgctgcttctttatttcatcgattccaaaaaggatacacataatacttaaaaggatagacacgtaaggtaaaagaatagtgaagtttgcaaagaagctaaatagggcgagagaaagagcgatagtggcgattataatttgaatgttttttaacatggaatcccccttaagtagaaagaaatagttactgagagaaaataattataaatgctaaattggtcaaaatttcattctacatataacgaaagtagtttgatattaaaaagaagaatatgagactggaaacgaaaaaatacgggatactcattgattttcgtccggatttcaattcattaattcctagaagaataaagaaacaactgagaataaattgtacgtatgggagaagtgaaaaattatcggtaacatggatataagtgcttagaatgagtaagagaagcatgagaaatgctaaaaaactccgtaatatagttagagttagcattgtatagcctcctttagaccatttactagaatatttctgtgaaaccaataaataaagcagcggcccctgctagtagagcgagcagactacctcctgtttgtcgttttaatatttcctctaaacttatggtgagggccatacctcctaaaaagatgaacatataaggcattatttctctactaccagtaaaaaatccatagattgctatagataaggcaataagtgataaagtaatccgacccccttttagcataaaagacctcctctattttatgtaggtaataatgagaactatccaaatgaaagcaccggcaataatacaaataaatccagttgctaattcctttttctttatttgttcaaatgcgatgagaaacattaaagcccctaatagaaattgtgaaagaggtaaaaaattattttgacctgtatataatccaattgccgacataacgatcacagtgagtgctactatgatgcgaagtatacgaagcatattaggaattctccttattcttttttgtataaggattgtcttctagtttatcgacggaatgtttataagcatagcctttattaattgtcatgatggagagtacgaggatgattaggacgatgataataccgataattaatattttgaacataaaatccctccttttctttattttacataattttgtaattgatgaaaacaatagaaaataaaaggatgaaagaagggtgttacatggagacgaaaaaaacatattatatatcaataggaaatggtcaaatttcacaagtgaagacggcggatacgtataattttgagatttccgcaaatgatgaggaaattacggaattaagagagcactttgatcaagcatatgtagaagatttagggtcatttgtacgctcccacgttccatttgttgagtatcatcacgattcaaataatgaccgatatgatgaacaactacaaaaagcatataaaatgatttacgatttaggaaatcatgagacgaaagaattagtcgcgcaaatgggaataatcaatggattgtaattggataatattatgcagaaaagcgagaatatgctacaatttgtggtaggaaaaacttgtaaccatcaataggggagtaatggcatgtacaaatttaaagattattaccacaacactgtacaattatcgtttgaacgttatccattttctcctgagccaaagcatgtttgggttgtatgccggtacggggatcaatggttattaacgcatcatttacgtcgcggtcttgaatttccaggtggtaaagtagaactaggggaaacaccggaagaagcggcagttcgagaggttcatgaagaaaccggcggcatagtttctgatttaacttacttaggacaatacaaagtatctggaaaagacaaaataatcattaaaaacatttattttgcaacaattagtgcggtagaagaacatacgcattacgaagaaacgaaagggtctgttttattaaaagacattcctgacaacattaaaacgaatagaaaatttagctttataatgcgcgatgacgtattagcgcgtacgatgaaacatatagaagaaatcggctgttttacgaagtaaagtagccggtttcttttttttgtatgtaagaataaatgtaaatatatctttatattattttgggtatattatacaattttgtaaagatatatttacattttaggaggggaaagatggataaaagaaaagaaacgactgttactgtttcgatggttaaattaaacttttctttattttttataataattgctttgtcgtttggaattggttatttgcatatatttctttcgggtgggggcggattaaagtttcactttatctccacctctaaaaacgaaagcacctccaacaaatcatctacgatacgtgaatgcttaaaattcccccaaaacgaatcttttttccaaacaccaagaatccctacttgttcagaaccaagcacatcgttttctggatgatctccaacataaagacattcttctgccttcacatctagtctttgcaaagcacgttcgaaaatttcaggatgaggttttttaattccttcagcttctgaaacgagaatggtgtttgtatacgtatgtatatgtagtgctcgaaggttgctcatctgaaattcagtaaaaccatttgtaataataccaattttaatgtttcgctgttttaactgttgaagtagttcatgcgtgtttttgaaaggaatacaatgatgttggaagtttgtaatatagtcgtgtagtagttgttcttgcgttaaagtagtaatgttgtattcggaaaggagagtagcatatactttatccttccacgtatagccattattatcgagttcaagaaatcgagaacaatactttgatttctctatgctcttcaaatgtgaggcgaagcgattatattgctcacaaataaattgttctaaagattggcgccgatctaatagtgttccatctaagtcgaataagattgcacgaatcatgggaagcctccttgcagtttttataattaattatcgcatattcgtaaaaaaatgattatgatattttgtagaatggaataatgggggattgtatgaagaaactgtatggcaagttagtgtgttgtattatagcaagcagtttagttgcaggatgcgagagtgctatcgaggttacgaaagaaaaagaaatttgtaaaacagaagaagagtgcacgcaaataggagataaaacattacaaaaagtatataaaaagatagagggactttcagaacttgaaaaagtagaggattatgacatagaagagtatgaaagtatgaatatgaaagaggcggaacagaaaaaagaagaggatgacaattacttctttttagcttcttattatatcgatgatgatgaaattgtagatccttattttgagaaattggatcgtaagagattgaataaagtttttgcagatgacaaagtagcaaaagatgatttgttaagccagcggcaagatagagagtatcatgaaacgttatgggacatgtaccgcactctcattccagtgaaatatcgtgagaatataacagggttggatttaataacggatggttatgacggcgttgttgcccatgtcatgccaagtatggatgacccgagagattggttgcttagtttagacgtgctcgattctggggtgaatatagatgaagtgatgaaaacattaattcatgaaacggctcacgtattaacgattgggcataaacaagtaccagtggataggaaatatttagaggcgtttgatgaagagaaagacatttcatcatatcgaaataaatgtaaaacggtgttcttgaaaaatggatgtgcgagaaaaacttcgtatattaaccaattttataatgaattttggaaaccaattgagcaagagtggacagaaaagaaagtagaagaaagtgaagaggcacaaattgaattttataaagaaaagcatgatgattttgtatcgctgtatggaataacaaatgtaacggaggatatcgcagatacatttacagcgttcattttacaagattcaaaaaaggtgaaagaaggaacagagttaaaatataaaaaaattgctttcttctatcagttccctgagcttgtaaaaatgagagcggaagtgctgtcgggattatatgatgtttcaaaaacgatagaacaacaaagtggagactaatgtgaggtatgctttcgatatagtttcgttaaagaaaagcgtgaagaatttttaattctttgcgtttttttatgttgataaaattgaaaattctgtatttttattaaaaagaagaaggaactttcggtataaaatagaattagtataaaaatgtcacaatttagacacaattataatgcgcgtgttgtagggactataagtttactctcgaggaggtaatgaaacgtatgaaaacgattcttgctgttgctggtctcatttgggtaatgtctcacggttttccgatttttgaaggggagcaaattcgtagtgctttgaatgaaaagtttaatgattatcatgtgatagatcgaaaagataatgtcgttacagtacgtgtgaaagactgtttccatacagttacggttgcggatggaaacattacaaatgaaacgaaaatgtgtgataaaaggtaaaagaaagaagctgactatagcgcactgttttgagtcagcttctttttctttttccaattagaattttttcaaatgcctcaacaaatacatacataagagttgcaagaacacatgtgagtagtacgctaagtaagacgagtgtgaagttaaagacttggaatccgtagctaattaagtagccaagtccttgtttggaaacgagaagttctccgaaaataacaccgacccaggataaaccaacatttacttttaacgttgagataattgctggaaaggatgcagggagaacgacttgcttataacattgccatttatttgcgccaaatgtgtccatcacttttatatagttagaatcgacttcttgaaatgcactgtaaataacgagaatggtaatgatgatggaaatgattactcccattgcgatagaagatgaaatgtttggaccgaaaataacgatgatgattggaccgagtgcaacttttggcattgcatttaggacgacgaggtaaggatcaagtacgcgggctagaagtggcatccaccaaagaaatgtggcaataatagcaccgagtaccgttccgagaatgaagcctactcctgtttccagcaatgtcgtccatatgtggacccaaagtgaaccgtcgatccatttcgttaagaagagatcccaaatactcgaaggagaactaaagagtaaaggatcgatccattcttttttgctagctatttcccatagtgcaaagaaaagaataagtagtaaaagctgtaatgagcgagcaatccaagcacgcctgcgttctttctttcgaaattgttcatgtagttgttttatattatccaagtcgttccagctccttccatatatcttgaaagagggctgggaaatcgtagtgatggcgtgcttctaacggtgataaagaacggatactttccgggacgataaaggtttttgcgatttttccaggattcgcttgcagtaaataaatacgatcactcatcgcaatcgcctcttcaatatcgtgagtaacaagtagtgatgttttcttatatttatttagtaagttgaaaacgagttcttctagttttaatttcgtttgataatcgagtgcggagaatggttcatctagtaataaaattttcggatcagttgctaacgttcgaacgagagcagcacgttgacgcataccgccggatagttcacgaggatattgtccttctaccccatgtagaccgacttgttttaaaagatttaaagtatgttctttcatctgttcatcataaatctttcgaatatgaagtccaagcataatattttcttcaattgttttccacgggaataagtaatcttgctgcaacatatatcccatagatgaagttttcgttgtaattggttcaccatctaaaaagacgataccatcaattggatcaagtagtccagcaatgattgagaggagcgttgttttaccgcaaccacttgggccgagtatagaaataaattcgccttcttccacttgtaagctcatatcttcgagaataagtttggcattctcttttgcgaaaaaacagtgagaaacgttacgtatttgtaaaaaactcatacacttcgcctctatttcttaataacgctttcggcaatttttgtattgacgagcgcttcatgtgggacttctttttgtaattcaccagcatctttcataatcgtttggagctgtttccattcttccgcatctagtagtggatttgtcgcataagaatgttgttttttataccgttcaattacttttactgtaatgtctttcgaagtgtctttaaatagcggagaaacagcatcagcaatctcttctggactatgtgtatcaacccattgctgtgctttatagagcgcacgtgtgaacttttcagcagcagctttatctttctttaagaaactttcttttgccatgaacgttgtataaggaacagtaccagattcatttccgaatgaagcgacgatataacctttaccttctttttcgaatatgcttgcagtcggttcaaagagctgcacaaactctcctgtaccagatgcaaaggcatttgcaatattagcaaattcgatattttgaattaagttcgtatctttccgaggatcaatgccatttttctttaaaacgtattccccaaccatttgcggcatgccgcctttacgctgtcctaaaaatgtaacaccttttacgtcattccaattaaaagagtctagttttttacgtgaaactaaaaatgtcccatctgtttgtgtaagctgtgcaaagttaatgacagggtctttcgctccttgttgatgaacgtaaatagacgtttcagaaccgacgagagcaatatcaattccgccagataatagggcggtcatcgttttatcgccaccagctgttgtttgtaggtcaatatttagtccttcatctttaaaaaatcctttttcaatcccgacatataatggggcatagaagagagaatgggtaacttcgccaacgcgaatgttttgagtttgttctttcgtactttcttttttactactacaagcagcaaaagtaaaaacagctagtaacatgatgcaaaaaatcgcgattaattttttcactatataacacctcctagaagtcactctacaagcatgatatgtaggtaagtgcccatatgtgagtgtagatagcaggaattttttgggtggtaaagaagtacaaatataaggggtgataaaatggagtacgaatacgatgatagcgtacatttacatcttgattatttcgggacagaatgtgatatggaatcgatcgcttataagaggaagaatgaagacgtatgggatgtgtattttaattttggagtatacggtattcagaaagacgatgtagagttaggtaggtttatggacgaatatgccggttattacgttttttctgtacatgctcgcgatcttagttgggaatttggaagtgcccagtttgaagagtgggttttgaaaaatcggatagtagaaaaaacgctacaaaaataggaggaattttgtgattggatttctcatcttattatttatttttgtggccggattttttattatgcaaatgcttatttaccgatttgcaaagaaaaacatccataaatatacaaaaataaaatggtttcatatgtggctacatatgaatatgaaaaaaggaccgagattagatttttttgattttgtagttatagtgctcgtatgtatcgtatggaaaatatggctgctcccttttatataatacacatactaatcattttctcttttcgttatagtaatagttgtaaaaaacttgcatttatacgtaaaacagtgagtggtgttgtgaaagatattttgacaaatacagacacacatacatacggaattaaagtgtgattacagaatggacaaattggccgtgtgtaaagtgtgggggaataagaaagaggtcgtccaacggtggacgacctctttcttattatgcttgattagtgcggaagaatggaagcttctgcacaatgtgaattaatccgtatgcaagaattaagcacataagaggattaatgaaaaatccatagcgattaattgctaagaataagtttgagaagataatgtaaataattgaacttgctactagcatcataacgcgtttatgtttaaatgaatttagcatgaagcagaagctgctcaagaatgtaccgatgataaacactctatgacatagttgcataaagttgtgaatacgatattggtctacagcaggagctgttttgaataattcaattgttttaccgacagtgaaccaagagaaccaataagtgaagtccgtcttaaatccgttcttaattaattcttttgcgtatgcacctttgtcatctaagcctttagctctcatttcatttactatattttcatatccaattttattaaatggatctgcaccggcaattagtggatctgcaccttgggttgagaataaaataaattggttgagtgctaagtagttacgaacaacccatgcgccaataataaagaaaggtccgataaaccataacaatccgattcgaatggattctttaaatccatatgtaaataacacaacaagaacaggaatgagcatcattggagctggatttggacggaacataagtaaaattgaaacgacaattccaaaccatatatggaatttcactttattgtatttccatgcgagaacaaatacatatacacataacgccaataagaatatggatggaacttctgttagcaatgtacggaagtatgtatagttacttggataaatagcatataaaatacttgcaacaattccataaatgtttttttcgaacaattcttttcctattaagaatactaatagcactgtgcaaaggttcatgatcatgttaataacagttgctacgtaatagtaaggaattgatgtaatatcagaaataatcatagcgccagctaatagtaatggctgacctggtgtaatatatgcatttttccctggaacttcactaggttctaaatacacataaccaaatacaccatgttttaatagttgttcagctgttaacgaatagttaaaggcatcatttgcaccatatgttactttgactaactctccatctaatcctggctgttttactaaacaaaaaacgtgcaacaggaaagaaagcgccaaaattgcatataccgctttaggcaaactcttaaacttagtaagcaaaaatgagcaactccttttttattaattctttcgtaattttatgtgaaatctttaatagtattaaggatttccaaaacatagttattatatcataaagtggaatgctgaaattaagtttttcaagaatgagtaatttgtataccacaatttaactgttgattaagggaagattaagacaatacatttatggtagaagcaagtatgctgacgaaatatgtaatatatgttattttaatagaaatagttctttcgatgcggggaaattaagacatagaaacgagggaatgaattgaagtatggttctacactttttcatcttccaaaaagaaatatattaatttctagcattataagtagtatggtgactttattagtaataactatgctgtttatgattttaaaggtttttaatttagacatgatgaaagatcatttaaatcaaaagcttgttttaagtgttatgatgatgttcatatggggcataacgttttatattacgcatttcattaaaaaagagatgtctatacttagagcatccctgcgagtgcattttatattacttttattagctcatacagtagcgttattttatattgtcatgcaagttaatatgagtttcatagaggcaatgaattggatttacttttataatatgcagtttatattaagttttgtagtaatttatgcgatatatattcttgtatataatttaataggtaaggtttttctaagtatggttttaacgagctgtacgttagtcattttatgtattgtgaattatttgaagcttatttttagaggtgatccgttatatccttctgatttcacacaaattactcatatgcaatctgttataccgatggtgatggactattttagttggagttatatttttgtcattatcttaagtatcgtagcttgtattgtagcagggatatatatgagaaggtatattcaaaatgtaaagattcatctaggaataagagccttattagtagtaggatctatttttgttctatatgcgtatggcaattttgcgaatacatttatgaataaagtatttcaaaaatcaggtgtagattttgttttgtggaatcaaaatgagaactacgcttcaaatggttttatacttgggtttattagcaatttagatacaacagttatggaaaaaccaaaaaattattctaaagaaaatatgcttcaaatagcaaacgatataaaaaaacaatatagtggaaatatagggagtcaaaagaaaaaagagaaaccgaatattatttttgtaatgagtgaatcgttttgggatccgacgaaagtaaccaacctttcttttagtgaagatcctgtaccaaatttacatcattatatagaaaactttcctgggggacaaactatttctcctacatttgggggaaatacggcgaacgttgaatttgaggcattaacaagttattcaatgagtttgttaaagccaggttctataccatatcagcaggttattacaaataagaaagaaattccatcaatccctacggcgttgaaaaaagaagggtattacacaagtgcaattcattcatttggtcgcacattctttaaacgtgatgatgtatataaggtgttaggatttgataagtttaatgcagaggacacgatgaaaaatgtggatattgatggagattatattagtgatttagcgatgagtaaagagataattgctgagttagaggaacaaaaacagcctacatttattcatgcagttacgatgcaaaatcattttccatttacagagggccgatttggtgaaaacctaatagaaattagcgggctagaaaatgaagaatcaaagggagaattagagacgtatacagaagggttaagacgttcagatgaggcacttcaatatttaatagagcaactagataatttagatagacctacattattagtattctttggagatcatcttccatcactaggaacaaataaatctttttataaagaaaacgggtatataacgaatgaaaaaacaccgagtgaacgtttagcgatggcgcaaacgccgctattaatgtatgcaaactttgatatgccaaatgataatttaggtttagtaagcccaattcatttttctaatcttatttttgattatgcaggattaaataaatccttattttatcaatttttatcggaactttacaaggaaataccagtgcttagagatgaattaaaagttgataaaaatggagaagtaatcaatgatttaacaaagaaacaaaaagaaatgttagagcaatataaaatgctccaatatgatttactcgttggaaatcaatatagtacagatatcctctttaaataaaagaaacaaaaagaacttgtataacgatacaagttcttttttcatagtatttaacggggtaaccagacaagctgggtttagggagtattacctgtacatttagtatatatgaaaatgtaatcgttttatttgtgtatttgtgagaaatatgtgaattttatgttttgtgaaaaatctattatattaactttcgttcttgtattgcagttgttatgcatgtaaaaattttatcagttctttatttaattcatccgcttgatcgattggtgaaccatgaccactatttgtaagagcatgtaactgagaatttttaattcgttgttgcgtaagctcagcacttttgtaaggaattagttggtcgtgaacgccgtggaagatttttgttgggacgttaattttatttaaatctttcgttacatcttcatttgcagctgcttgtaaaattttgataagggcataagaagcggactgcataccgagataagaaaaccattcaagggttgcagcccctaagtttctattgaaaaaggataaagatacgtcatttaaaaattttggtaaattagcatacatttgattaatgagagcatctgcttgttctttcggtacaccgtaaggggactcttgatttttaacgaaagagggggagacagcgtcaattaatgcgagcttagaaatgcggcgcccatgatagcgagacatatagcgaatagaaagagcaccaccaactgagaaaccgactaatgtagcgttctctacttggagtgcttctagaacaattgcgatatcatcggctaatcgatcatacgtgtaaccagtccatggcttatcagattgcccattccctcgtatatccatggcgatacaacgaaagccatgctctggtaaaacattgagttgatattgatacatttgatgatttaaaggccatccgtgaacgaagaaaacagtcttactacctggaccaggattaacgtcttgcacaaaaatatgcacatctttctcgacagtaacaaacataaaactccccctgttctatcaataggctccattctaaaagctttgttttactttttaggccgtctatataaaacatcctccataatatacgtattaatgatcatagattttatgctctgtatatagtctaaatatattgcgtttttggtacgattttcctcaaatgttcgatttatctttgtttgtctatgaaaatcatttattataataaatggtattctttgagatgttattttgaaggggtgttgaagtgaaagaaagttttctatcatataaagaagaagaaaggaatgcaaaactccttttatgggtgttatatgtcattgttattgtatatcaaattttctatgcaatcgtattagaagataaatcaataatggataagggatacaacataatatggcaagttatttgcggagtagcaatactatgcgtgaatatatatttactgaaaaaagagaaggcaaaccttgttaaatatgcatggatatttgcatacatagggatagaaatcgctaatatagtttcgtatattttttataataaggcggcgtttgatgcgacaaatataatagaaattattctcattttctttgtacccatatttttaaataaaaaattttatgtgtttttgctttcctctattgtaggaaaatatttaatttatttatttgtattagaggaaataaaagcatttatgttccttattatgtgtacacttatgttaatagttgtatatatcattttaaatcgatttttacaatatctttcagccgtaaaggaaagtattgcgattgctagtgaatcacaaaaattagcagtaatcggaaaaatggcagcgactgttggacatgaaattaaaaatccactggcttcattaaaaggatttacgcaattacaacgagagaagcatgaagaggatcctatttataaacgtatgatttttgaaatagaaaatatgaataatatgataagcgagttgatggaagttgctacatgcaaaccttctatttataagaaacatgatgtaggaaaaattgtattacaagtaataacaagtcttcgcggaaaaatgaatgaattaaacgtgcagtttatttctaatgtggaagaaaaaacaatagaagttgaatgtgatgaacgaaaaataagaggagtctttttatatacgataaaaaatgctttagaggcaatggaacaaggtggcatattacatttgcaattagagaataaagggaaagaatatataataatcagcgtaatcgataatggtcatggtattaagcaagaaaacttaacccgtgttacagaagccttttatacaacgaaacaagataaaattggtctgggacttacggtagcgaatcgaattgtcgccgagcaccttggtgagctgcatatttcaagtgaaagagatactggaacgagaatagacatcattctcccaaggaagtgtggaaatactgaaatccaagtggaagaaaagctaggagttaccatatgaataaaggctatatatttaaaaatgaagaaataaaggcattgaaagtatttttaagtttattttttattatattttttgtgtatgatcttgcctatgaatttatcgtacctttaatcgcgggagagcaagaaggcgtaggaaagtttgaagatggtttaggtttatggctttactttttgacggtagtattgttttgcagtggaatatactttatgaaatggaagaatgtttttgtggtaaagtatattattctaattggctataatgtattagattgtatccataacattatgatttattatggtagcgatgcggaatttgacggtggaaatatagtagaagtattttttattttgtttgcaccaatctttgtgaacaaaagatatttctggttagttccagcgatacttgtcgggaagtacgctcttacaggaatcattattcaatcttctctcgttttaatcccaatggcattatatagtgtatttactattatatgttggattatatttttgagggttcagtcttacgttcgtacgcttgagatgatggacaaagaaataaaacagacagaaaaactagcagctgttggaaaaatggcaacggttattggttataagattagaagacctttagcaaacttaaaaaaacttgtgaataaacaagccgacaagcatccagaggataaaatttatagtgatattatgaaacaagaagtagatcggattcatataattgctacagaacttagtggatttgagaaatctaaatcactagaatcagaaactcataacatacaagaaattatctcttatgttattcgagttatggaaaagcctgctttaaaacaaggagtccacatacaaggtatttacagtaaagacttaccgtccattacatgtgatgaaaaacgattaaaacaggtcttttttaatttaatcaaaaatgcaattgaagcaatgtcagttgggggaaaaattacgattaaagttactgtaaaagatggaatcatcgttcaagtgaaagatgagggatgtggtattccaaaagataaaattccaaagttaaatgaagccttttatacaacgaaagaaacaggaactggtctaggtttagtagttacagaaaaaattattaaagaccacaatggtaaaatgagttttgaaagtgaagttggggttggaacaacggttgaggttatgttaccactgcattaaatagaaaaaacatcacttatttggaagtaatgcttttgtgttcttcttaggtagacgttctaaaaaagaggacgataacgaaaaataatatattgatagtgtaaaaagaaaataatggatgttttactatgaaaaatatataatggctttgtctgttatttgttgtagttcatttatatttctatttgttgacccgaatctcgggtcttttttttatgaaatgaattgctatatgtcagtgattagaaaaatagaatatacagcacttgcagtaattccaggggtaatataaagggatatagcatctcctcttgcaactgggtttccagttgtaatactagtccaagttacagtagcggaacctactgccggagtaggattaaatacttgaatttgtcctactccgctatccgttggtttaatggaaaataccatagttctggtgtttccgttagaactgctgttgcgtctgccgtcgcaactaaagcaattaagtggtacatatacgttctcctttctatattttgaaaatctagtatttaaaatataacttaatatatatattatgaattctatatttttgtgtggcggatcgtattttgtgtctagatttcaaaaatagggtgagagtgtattgtatatcgaatttttttctataaatacagaataataagtagttataaaatatccattacttattttgaaaatctagtatttaatgagatgagaaaatcatctgttttcttaataaaatcatctggttgcacagtaaatgtagcagattgatagtttggtaaccattgtacgccaatcgttcgtacatctgcctgttttccagcaagtatgtcagcatcactatccccaataaaaattgcttcgtttgcatttacatttaatgtatttaatacaagaagaataccttcagggtcaggttttggcttcattacatcatctccagctactatacagtcgaagaaagaaactaatcctaatgcttttagagaaatatccaggcttctttttgcttttccagttacgatagctaactgaaacccttgtttttttaaatgtattaaaaggtctactatttcatgatttcgctttacgtaatcatgatgcttttcttcataacattcatagtatctttcaactgctacttctttttcttcagaaagtaagttctcatgaataataccaacttcacttggaccaaacatagaaagaatctctgcttcagtaatttctttattatcaaattgccaaaaaacgttttgaaacgagtaataacataaaggtaaagtatcagctagtgtgccatcaaaatcaaaaataattgtacgtagcattttctcacttccgttttaagttattttaaggtttatttaagagattttgttgtgatatacttaaaataacttaaaagtacttaaaagtaaatgaaaatgggtgagagtatgaatcaagaggaacgtttaataaaaataatggattatttgaatgaacataggacgatgagtttgaagatgatgtgtgagctatttcaagtttccagagatacagcaagaagagatattgtaaagttaacaaatgaaacaacaataatacgaactcatggtggtgtagctttatcatctttccaccgtaaaatatcggattatgtaaatcgtgaggaaaaagaaattgaatataagatatctattggaaagcaagctgcttcttttgtaggagataatgaaattatttatcttgatgtttcaacaactgttaactgtatggcttcatttttgacagcaagtaatataacggttgttacaaattcaattgatacagtaaatcatttaatggatatggagaatgtaaatattcatattttgggtggagaattaaataaacactcacgttatatggcgggtttttctgcaatggagaaactaaaagattatcattttgataaagtttttattggatcacccggccttacagaagatggtgtttattatgcgtatgaggaagatattcattttaagcgtcaaattgttaaacaaacgaatggagtgtttttacttgccgatgagacaaaaatgaatcaacgtcaaaactttaaggcactgtcattagaatcaatagatacaattattacgaatgatgttattcccggcaatttagaaagagtagtgaaagaatatggaattgagctaatcactggagtgaagtaaagggggacgcaaaaatgaagggaattatatttgatattgacggaacaatgttagatacggaaaaagcagttttatattcattacagagaacgttgcgagatgaagggatgaattattcattagaaaagctacattttgcattaggtattcctggtatggctgcgttacaagaaattggtgtggaaaatatgaaagcagttcatgagaaatggatacgtaatatggcagattttaagaatgaaattacagtatttaaaggaattgcggaagtgattgaaatagtatcttcatataagattcgaacaggtattgttacttcaaaaacacgccaagagtttatcaatgatttcaagccatttggattacattcatattttgaacactctatttgtgtagaagatacaataaaacataaaccacatccagagccacttgtgacatgtctaaaaagattgaatatagatgcacaagaagcgatatacataggtgattcagtatatgacttacaatgcgcaaaacaagcgggagcaaaatttggtttagccctgtggggagcgaaaacaaggaaaggattcgaggtggctgattatatttttcaaacgcctcatgaaattttaagtttagtaaaaagagatagctaaattggctatctctttaaaaatttataaccaccatttctcctgcggaagcaaaataatatccacatcaaaattttctttaaaccaatcatacatcaatgtctctttcactaaatattcagaggcagagtgtgacacaccaattagagacatattcgtttcttttacataatccataatgagcgagtatttatgtcggccgtaatcattgtcgatatggcagtggatttctcctgtaatatatgcttcagcacctttttcttctgcttccttcattaaagatacaacatcgccacacccagcgataattgcgatttttttaatggaatcatgtcgtttaccttcgaagtctgtgtaaggaatctggaagagttgttttagatgtttttggagtgcttctgttgatgtttcatctatttcacaaataaggccaattggttcttgttctggacctccatatgcaaagtcgtccactacagtagcgtttaatgcttttgcaattgaaatactcgttccatgcgtttgatgaaaatccattggtacatgacatgtatatatagaaagttgtttttcttttattccttgcaaatatttttcaggaattggtatgaaaccgcgacctgatcttccaagcggatcaccacactccattacaaggggatggtgcataaagagtaaatcaccaggtgtggattgtgaaatgaatgtttcaagaatgtcatctgtagggaatacagctaaaaatactttgtttacattttcagatccgtgcatcataaggccgttaaataaatctacaaaatttgcttcgaaaaattgttgccaaggaaatttgataggatcatatatggctgggataaatcgactaaaggcactatcttttccgtatttttcaatttggaataagtgatcgagtgattgctctattttttttaaggctggcatgtttgataatcctccttaagatgattcttgctttatgagttgtttgtattcttcgtagcaaaataagaagcggataggaaacaaataaaacctaggatccagctaatagaaggagaatagggaagtacatgctgtaatagcattccgctagaaatgaagaaactactaaatagacctaataacatgggatatcgttgtagtttgaacacggatagtaaacatcctttctcctgcatgaactactcataaaagctcgattactgaaactttatcacatacattgtatattagtcttaattttctgtatataacttttaagaaaaatgatgatacaatatatgaatgataagagaagagaggatgaagattaacatatgtacgttactgtaacagaagcagcatataaaaagattatggatacgattccaagtgaagcgaaatatataaagttattttacgataatgagggttgcggttgtgtcatgagcggaatcatcgatttagtagctgtagcagagaaagatgagcgcgatgtggatattgaatcaagcacaatgaactttatcgctgatcgtacaaagcttgtatttatggacgataagttaacggttgattggcatgaaggtggaggaacttttcagttgaagagcccaagccagttttataatccaaatatgaagttacacgttcgaatatagtaaaggaaaggtgattccaaaatgtattttggaatcaccttttttattttataagtcgctattattgtcgatttttgttgataagtcgatatattgaaaaaatcgctgatataaatggagttgcgctgatatatttgggaaatcgccgatataaatggagttgcaccgatatattcagaaaatcgccgatataatttcatttaccaaaacgtttcaaaagtaaaaagattttttcacataatgaaatgtacatgtgattgaattttctgtataatcttctttgcggaggggatacgcatgagaagatggggaattgagttgttaattttaagtgttgttattatttgggggattaactatacaattgcgaagtatggacttttagaatttacagcaattgagtttactgcacttcgcatgatggcggcggcaccgcttctgttactccttaccttttttattgaaaagtcggtttatatggagcgaaaggatatacctagattaattatcgttagcattgtaggtattgtactgtatcaaacgttatttatggaaactgtcaaatatacatctgctacaaatgcctctttactcatttctatttcacctatttttacaactgcatttgcgattttcttgaaacaagaaaagttttcttctcgaaagttaatcggttctatgactgcctttgttggtgcagcattagttttagtagcaggacattcgcttactagttctttttatggcaatggaattggacttattacatcaatatgctgggggctttatcctgttttagcaggaccattaattaaaaaatattcagcattacgtgttacagcatggtctgcattagtgggtgcgattccgctattattgttaagtggtccacatgtgtttgtcatgccatttcacattactcacggaatgacactatttgctttactatattctattttctttgtaacagtatttggtctagtaatgtggtatgttggtgttcaaaaaattggggcgtcacatacgatggtatatatgtatataacgccgcttgtagctgttttatttgcagctgtctgggcaaatgaatatgtatcgtttcaacaaatcatcggtggaattatcatttttgtcggtctatggtttgtgaaatcggagaaagtaaaagttcattctattgcaggggaacctatatcaaaataggaaaacagatcacctatgatctgctttcctatttttttatttttggtaagaagatgagaaataagatagcagtaataagtggaattaagtttaaaaatggaatacggaagagtgtaataagaataatacctggaagaagaacaccgaggacagcgtaaaaaatgctatggtttttcgtgtaccaatacaatgaaagtccaataagtgcagggataatgaggtgaatgagagccattaaaaaataaatcattagacgccccctttatttgtgtgcttattacatcatatccgtatgttcatagattgatatcatttttttcataaatggacgaaaaaagtttgaaaaaccgtcacaaaatatgagaatatgatgttttaaatcttgtataatattatttcctaaaaatatttaaacaacataaacatactgtttatgttgtttttaatttgagtgaaatggatgtaaggaatatgaatttgaaagaaattttttgttggatagataaaaattactgaagaggagaacagcatgattagtatgtcattaagatcgtttaaaattcaatcgtattatttactaggttttcttttactaggctggatgttaacgccgttttcagctcattttctaggtgctggaattgggcttattgtaagtatgtattgcgtttggcttttagggagacgaattgagaagcttggagatagtattgtaaagaagacgaaagcaccgacactcggtatgtttaaccgttttgcagctgcaattttgggtgctattattatgtacgaaattgagcaccacatggttatgtgggcatttgcagtagggattttgggtgggtatttcttaattgttgttaatttaggatactatagcatgaaagatgagaaagaactaacaaagagctaaaaaagataaaagacttctttttagatggaatagatgatccagccacggatagaagcggtcagggccttttttagccccatacgatgtgaaacccagtagggatataatgtatatattcgaagctgtaattttataatctaggtcatagatgaagagattagcgtttcactttatataagatatagaaagaagcttacgttttcacgtaagcttcttttttatgtaagtgtgtgtaaccgttaagccgcattgggttttgtcggtgagtacgcgaaactttacggttacacgacacttattcatatgagtaaagggttattccaacagaaagttttaatttaagcgattggaccgcctaagttaataatgtcttcagatacgctgtcgaactttttgaagttagctttgaattcatttgcaagttcgattgcttttgctttgtaagcagctttatcagcccaagtttgttcaggcattaacacttcgtcaggtacacctggtacgtgaagtggaacttcaagaccgaagatgtcatgtttagctgtttcagttttcgcaagttcaccgtttaatgcagcttgaatcattgcacgagtgtaacctaagttcatacgtttaccaacgccgtattcgccaccagtccagccagtgtttactaagaatactttcgcatcgtgtttctcaattttttcaccaagcatttcagcatagcgagatgcatcaagtggtaagaatggtgaaccgaagcaagttgagaatgttgcttgcggagatgtaacaccgcgctctgttcctgctagtttactagtgtaaccacttaagaaatgatacatagcttgttcttttgataacttactgattggaggcaatacgccagatgcatcagcagttaagaaaatgattgtatttgggtgtccagcaacacttggcagtacgatattgtcgatcgcatgcatagggtatgcagcacgagtattttctgttaaagtagtatcgttatagtctgcgatacgcgtttggtcattaatgataacgttttctaaaacagatccaaatgtgattgcatcgaaaatttgtggttctttctcgtgagaaaggtttacacatttcgcgtagcaaccgccttcaatattgaatacaccgttatcagaccaaccgtgctcatcatcaccaattaatttacggtttggatcagcagataatgttgttttacctgttccagataaaccgaagaataatgctacatcgccttcttcacctacgtttgcagaacagtgcatagaaagaatatcttgttcaggtaataagaagttcataatagagaagattgattttttcatttctccagcgtattctgtaccaccaattaatacgatgcgtttttcgaatgaaaccataatgaatgcttcagagtttgtaccgtcaacagctggatcagctttgaaattcggtgcagaaacaattgtgaactctgattcatgagtcgttaattcttcttcagttggacgaatgaataattgatgtacaaataaattgtgccatgcatattcgttaataacttgaattggtaggcggtaattgcggtcagcgcctgcaaatcctttgaagacgaataactcttctttttcttttaagtattctaaaactttagtatataatttattaaaatgttcttcagaaatcggttggttcacagctccccaagcaattttgtcagcaaccgatgcttctttcacaataaatttatctttaggagaacgtcctgtatattttcctgttgaagcagaaacggcaccagtagaagttaatttcccttcatttcgcattaatactttttccactaattgcggaacacttagttgaatctgtgcattgcttccgttcaataattcgtgtaaaccaatttggacattcacagtactcatatttatataccatccttttcatttaatgaaatatttctcgtaatccccaacaagagtataacacaattatataaataatgtatactatttatttctttttgtttgtgtgaatgcattatttccttattaatatttcatttcaggcgtattgagaaaaactttcaggaaaatgtgaatattaattgacaaatgaatatcatttctttagtataggttgggacggatactctcttatcccgagctggcggagggacaggcccgatgaagcccagcaacctcacttgtattgataaatgcaggtgaataggtgctaaaacctgtgcgaggctacaggtctcgaacgataagagcgaagggcaaaaagcagtatgcaagtagcaaattaaacctttcctctatgtaaagtaggaaaggtttttctgtatgcttgtgtgggagaataaatgtatgtcgcagtttgtggcaaattaaggatgagttccgtacaatatatacaattactgtagggaggtttaccacatgacaaaaaaacgtcatctgttcacatctgagtctgtaactgaaggacatccagataaaatttgtgaccaaatttctgattcaattttagatgcgatcttatcaaaagacgcaaatgcacgtgtagcttgtgaaacaactgtaacaactggtttagtattggtagcgggggaaattacgacttctacttacgtagatattccgaaaatcgttcgtgaaacaattcaaggcattggttacacacgcgcaaaatacggattcgatgcagaaacttgtgctgttttaacatctatcgatgagcagtctgctgacatcgctatgggtgttgaccaagcgctagaagcacgcgaaggtcaaatgactgacgctgagattgaggcaattggtgcaggagaccaaggtttaatgtttggttttgcatgtaatgaaacacaagaattaatgccacttccaatctcgcttgctcacaaattagctcgccgtttaactgaagtacgtaaagatgatacattatcatacttacgtccagatggaaaaacgcaagttacagttgagtatgatgaaaatggtaaaccagtacgtgttgatactatcgtaatttctacacaacatcatccagatgttacatgggaagaaatcgatcgcgacttaaaagagcacgtaattaaagctgtagtaccagcagaattaatggatggagaaacgaaattcttcattaatccaactggccgcttcgtaattggtggaccacaaggtgatgctggtttaacaggacgtaaaatcatcgttgatacttacggtggatacgctcgccacggtggcggtgcattctctggtaaagatgcaacgaaagttgaccgttctgcagcatatgcagctcgttatgttgcgaaaaacatcgtagcagctggtcttgctgaaaaagcagaagtacaacttgcatacgcaatcggtgtagcacaaccagtatcaatttcagttgatacattcggcactggtaaagtatctgaagacgtactagtagaactagttcgtaacaacttcgatcttcgcccggctggtattattaaaatgttagacttacgtcgcccaatttacaaacaaacagcagcttacggccacttcggacgtactgatgtagatctatcatgggaacgtacagacaaagctgcagctttaaaagagcaagctggtctataatatatgaaaaaaagctttgcgcggtgagcgcaaagctttttttatttataattacgttggaataaagcgaagagttcaatgtcatgccaagtgccgttgcggaatatagcttctttacaagttccttcatgttgaaaaccaagtgatttatataatttaactgctctatcgttaaaagaaaatactcgtaaagaaaggcgatgtaaatttaattctaaaaatgcataatccaataatagggttaaagcttcctgcccataaccttgcccccagtaatcctttttaccaatatcaataatgcattcagcgtttcgattatacgaatcaatatgaattaaagaagtaataccaattggaagatgcgtagctttttcttcaatgatataggtcttagagttcgaagaatgaataaattgccggcaaagtttttctgtgtcttgaaaggaatatttatcaagagtgagtgtagttgaactcataacgtctatatcattatgccatttataatatgttagaatatcatcttcggaaaactttcgtaactggatacggttggattcaaacaatgtaaacaccccttttgtatttactggtttttgttcattatctcaacacacgaactacaataaatttgtccttctaattcaatatactttttcatattcgtcatgtcattcgccggaaagggcatatgaatccacgctttttcatacgtttgtatttctgttttacatgatttacaaaagattgatttctttttgaacatatgtgatcaacctttcatttgacgtgctttacttgcgcaaaaggcactacttagtaaaaatagtgtcgcgaatataatgcttactaatgtagcgtatggaattgcgccttttaaggaaaagccgacagtgattgaagcgatgaataagaggataaatgttgttgttaattttttataaagttccatacaatgtagacctccaatttattttttagtacaagttttaaaattgaattctattatgtagaaaatataaagagtagctaaagatgtgtagtctaggagtataagaaagtacactttcctttttgtgggttagtatacttatattgtatcatggcgcatgattggcttcatacataattgtgtaaaggtatgtatgataaaatgaagaaaagtctttaagaaaggaaagataaaaaatgagtgtaactgaacataaaaaacaagctccaaaagaagtgcgttgcaagattgttacaatttccgatacacgtacggaagaaacagataagagcggacaactattacatgaattgttaaaagaagcgggacataaagtaacttcttatgaaattgtaaaagatgataaagaaagtattcagcaagcggtgttagctggttatcataaggaagatgtagatgttgtattaacaaatggcggtactggtattacgaaacgcgatgtcacaattgaagcagtatcagcgttattagataaagaaattgttggatttggtgagctgttccgtatgattagttatttagaagatatcggaagcagcgcaatgttaagtagagcgattggtggtacaattgggcgcaaagtagtcttctcgatgccagggtctagcggagcggttcgacttgcgatgaataaattaattttaccggaattaggccatattacatttgagctgcatcgccaatgagtaagtatgctggaattgtattagcgggcggtatgtcgagtagatttggtgagccgaaggcgttagcaatttggaagggaactacttttgttgagcatattgtgaaagtgatgggaactactttgcaagacattgtagtaattagccatactgatataaaagagcgagtagagcaattcgtacaagttcctgttatagaagacattccgcactataaaggaaatggaccgcttgcgggcattgtatcaggtatggaatacatagaagcagattggtacgctattatgccttgcgatgcaccaaacgtttcgcatcaatggtttgccattttactagagcaaacgagcaatgaatatgatgcggttgtacctattattaatggaagaaaacaaccgctacttgcggcgtatcataaccgcgtgaaagaaaagatttatgctttacttcaggaagaaaaaagaagtatgggccagcttttatcacaatgtaatgtgaagtatgtttctggagaagatgtacaagcgaatgcggattggtttataaatgtaaatacgaaagaagaatatgtgcaggctcaaaaagacctttcaaatgaatgaaaggttttttgatatacagaattggggaacaattactgtataaaggtatgtgagtaagttgattttaaggggaattcttaaaatcattatacagtttaaaatactgtataaccatatattaatttttatgggtttttattacaagtctgtttagttatgtttatttttgatataattaatatagaaataaaacaatgtttaaccttatgtatcatttattaaactaaaatttatgaccatgtaataaactcccttcgtttttttgaagggagtttttctatttaagcaagcaactctgatgcgttatgctgcaggacttcttcataatggttaagcaaaccgcgaaagatctcatcccagctctttgatttcgcaaaagatgaagctgatattcccatctgctcaagtttttcttcattttgtaataaaaaataaatggatgatagaaatgcatcttcatttttaggcggacaaagaactcccgtttttccatctgtaataatatttttaaccccgccactatttgcaccaatgacaggtgtaccgcatgcgagtgattcaagtacgacatttccgaatgtttcagtagctgatggaaacaccattatgttagaacaagcatatgcttcagctaaatctgcactttgtaaatagccagtaaaagtgatatttgttttcggaacagcttcacgtaaacttgttgctagaggaccgtctcctgcaatgagccaatgaatatcgtttcgagtatgtgctgttttaacgataaggtgttgcagcgtatcaatatctttttcaggagcaattcgtccaacataggaaaggacatacttcgctgtaatattatatttttttcggaataggtctgtattgtaagcaggatgaaagagtgtgcaatctacaccacgtccccatatagagagggtctgaaagcctttgttttttaattgatgtaatgtttcaaaggaaggtacaaaatttttttgcatatgactatgaaaccattttaaatagttccacagcatattggagaggaattcgattttgtaataacgtaaataggcatcgaaatcagtatgataagaaccgacaactgggatgtttaacttttttgcataatacaatccacaaagtcccatgttgaaaggtgtggcaatgtgaataatgtcaggtttaaaggaaagtagttcccgtttaatgcgcggagtaggaaaagaaaaacgacattctggatataatattgttaacgggatacttctcatcttattcacattcgctacaaaattatcttcagctgtatgctgaggggcgaaaacagaataggcgatctgttctttctgaaaatattgtgttaatcgctctaacgttttcgcaaccccgttaacttgtggcgtaaaagtatcggtaaaaatggcgactctcatcatatcactcctttatgtgaaaagtgggatgaattgataaaaagagatgatgccagaacaagtgccaaggcacataccgacgaatacatctgacggatagtgaaggcctaaataaatacgtgaaataccgacgcataacgctaacggtaataggaaagcaagtaagcttggattatagcaaataaatggaatgaagacagagaaaacggctgttgtatgaccagacgggaaagagtggtcttttaatggatggactggatattttgcatcctgaattgttaaataaggacgttttcgcggataccacctttttaatatttgcacaggaatatggctaattgctaacgaaatagcagttgcaattgcagcttgatgcaaagttccctttgcgaaaattaaaaagaaaagtgtgagtccgatggagaaagtcgcgccaccgatatgagtaatattgctgaaaaagatatttaatgttttttgatcaaagtagcggttaattcctctgaaaatgtaacattctattttatataatccactgaccttcatgaaaattctcctccctcatctacatatatatggagatattagcttttattttaataagattttgttgagggagtaataatgttttgtaaagaaaaagttagattttatataaaaaaagctgccaatcttatggcagcggaaatttacttctgtaatgatttataatattgacctttttcaacgtattgcgtgcgaatacgctccatatctttacggtcttcttctgttaattcacgaatgactttcgcgggacgaccgaaagctaacgtgttcggcggaattttctttccttgtgaaacgaggcttccagcgccgataaaagctccttcgccaatttcagcaccatctaatataatagatcccattccaattaaagcatctttcttaatatggcaactatgtaaaatgacttgatgcccaattgttacgtcgttttctaaaataagaggatactgcgggctttggtgaagtgtacattggtcttgtacatttactcggtctccaatgattgtcggtgacacatcaccacggatgactgtattaaaccaaatacttgattcctcgccaacggaaacatcgcctgtaatcgtaacatagtcagcgataaaagcactactcgcaattttcggttttttttctttgtaaggatatatcatgtaaagtcttcctttcctagagactagttttagtgtatcaaattatgagaaagagtgaaatggaggagagccgtatgtggaattatgaagcggaggaagcaaaagctgtcattgttattgtgcacggcgcaatggaatatcacggacgttacgaagccgttgcggaaatgtggaatcatatcggctaccacgtcgtgatgggggatcttccgtcacatggaacgacttcaagaaatagaggacatattgattcatttgatgaatacatagaggaagttaaattatgggtgaaagaagcaagaaagtataggttacctatttttctattcggtcatagtatgggtggtcttattgtcattcgtatgatgcaagaaacgaagagagaagatgtagagggtattattttgagttcgccttgtttaggggtagtgactggaccctctgctccgcttcaatttgcttcaagaatattaaatgttgtggctccaaaattgcaatttgcaacgaatcttacggtggaaatgtcaacacgtaaccatgaagtgagagatgcaatggagaatgattctttgttcttgcgcaaagtatcagtacgttggtatagtgaattgattaagtctatcgaaattgctcataaaaaaatagatgattttccagatgttccgctcttgctaatgcaagcttgtgaggataaacttgtagataaaatacgtgtccgcacttggtttgataatgttaaaataagtgataaggcttttaaagaatggccgaattgttatcacgagctattaaatgagtatgagcgtgatgaaattttgagttatattcagtcatttactgaaatgcatgtcaataatatagtaaaaacaaacaaataaatcattatttgtacatttaatagaggagatgaaggaagaagtgaacgtaccgagtaatcccataacgctcatggcgaaagtataccgtgatgtgtttccggttgtacaccatgagctagcgatgtggaaagagcgtgcctaccatattccgaatgatgagcttcatagtcaggcaatcgcaagtattgagcataaaacgtttcattgtgagggcggtggcattttagctctgctagcaaatgaacaccgagaagaatgtattcgttttatcgtagcgtatcaaacgatcagcgactatttagataatttatgtgatcgcagtacatcacttgatccaaatgattttgccgcactgcatgaatcgatgttaatggcattatcacctgaagtagaaggtggcggtaattattatcgttatcgtgatgatcaagatgatggtggttatttagatgaacttgttgaaacatgccaagatgttttaaagaaaacgaagcactatgacaaaattgctcctgttcttcatgaacttgcttgttattattgtgatttgcaaattcataaacacgtgaaattagaagaaagagagccgcgactgaaaaattggtttgaagcacataaagaaaacttacctgagatgagttggtttgaattttcagcatgtgccggttctacacttggaattttctgtcttgttgcatatgcatttcatgatgaattacatgatgaagatattgcgaaaattagacaaggatacttcccttacgtacaaggacttcatattttgcttgattatttcattgatcaagaagaagaccgtataggcggagatttgaatttctgtagttattacgaaaacgagcaagcgatattagatcggatgaaacactttgtagaagaagcagagaagagcattggtgatttgcctcatgcgaagtttcatcgtctcataagcagagggttacttggtatttatttatcagatcaaaaagtatcagcacaaaagaatatgcacaaaatggcacggcgcattgtaaagtacggaggcctcacttcacgattcttctattggaacgggaagatgtaccgaaagaaaacagcgcagtgatgaagaaaaccactaatttagttaaagacactcttatgagtgtcttttttgttattttgaaaatggcgtattttatcagtatacagaaaataaaaagggtccacgatctgttgtatatagtaggtggtgggctttttcagtagcctcatcttaagtaggaacactttttttcacctatcatacaataacccagaaaataacttgctgttttttgtgaaaaggagtatgacaattatgactatagtagctttaattaccattttattactttcgttatcttctagtatagataattttggagtagggctatcttatgggattcgtaatattcgaataggttttttagctaactttataattgcaattattgcttttatttttagtgaaatgggtattttgtttgggcaatatatttcaaaagtttttccaggtacattatctgacgttattggtacattgtttttgtttgtaattggtttacgaattattttaatgacaattccacaaaaaaagaaggctaatcaagaagtacttgatgaagatgaatctgtttcgaatgttattactggatatttaaaatctcctgaaaaagctgaccttgatagatcagggaatattagtttttttgaatctattgttcttggtattgctatatcgatgaatgctctaacgaatggactaggtgcaggtttattaaaattatctccatttgctatttcattatcagcagctgtattcagttttttcactgtttggttaggagttaaattaggaaaaaaagttgcaaatgtaaaaattggatcttggacattaggacaatttagcacagctttaagtggatttatattattattaatcgctgtacacaatttgttttaagtacaaattgtggtgaatacattggggggatttaattttaatggtgggaagtgtgttattggctggaaagataaaaaagttattaataaaaaagaaaatgccattgaagatagataagtgatctagagagaaataaaaagcatttgtacaacgcgtgtacaaatgctttttattatgatcgtatttttgaaaatacatatataagaagttcaatcgcaaaaatcactaatacagatagtccgaataaaggcatggcagcgcctagtataaccatcatgataaagaaaacgattatgcttttcttatctctttgctttggtggtgctgctaattttcctttcggctttcttgctaaccacatttttactccgtaataaataagaagtagtagagataatgtcgttagtaagcataatattttatttggccatccgaataaatgtccttcatgaagcgggatgccgtaagtgaaccattgtgcaagtaatccataatcacgatagtccgtttttgaaatgaattccccgctatattgatcaaagtaagctgttatctcttcatttggtgcaacatgcatacctgtaataccagaaccgctcgatttcgaaacggtgaatacaccttttggatcagctggtagtgaaataacatatggcttctttatttcaattcctttttgtaattcatcgacagaaattgctttcggttcatttgaattcgattcaggcggagcttcttttcttgttgcccacggcaattcttttacctttgattcaggcggcgccatatacaatttcggatatccgagcgattcattcgacgacgcaattttataaatttggttacccataaatcctgaccatggcaatccagatgcgactagcagaacgagtggaattgtaaatataataccgataatagaatgacgtcgttttgctttttctcgcttattggatgccggtttgtttttgaactggcgtatactcatgtacaacccagtcacgattaaaaagatagtccagcatgccgcaagttctacagtatagttgacgacagtgccaccaactaaaagagaactatgtaattccctcattatattggcaaacgtttcacttgcattttgatccccaacaatttgattattactatctaaatacacatatttttgttgtccagtatactcatttgcaatggtaagtctcgtattataatccccattaaactcactaattttcgccacactataatgtggatattttttctctgttaacgaaatagaatcagccatcgaaatagattctgtttgagcgctcttcccaaaatataaatctttatagatgaaatcttcaacttcctctcgaaataaatacccaattccgctcagtgacaacgtaataagaagtggcgtaataaaaagcccagcataaaaatgccaacgccaaaaaatgtaatgaagcgaacgatttactttcatactttcagttcccctaaccttccctatatgaataactacttatttaatatagcgagattaagtgtgattactttgaaagaattgtgaagaaagttaaaagtttgtgggatttttattaaacataaaacacattttagaaggagtgttttctatgtttatgaagatctctttatatttgataagtacatcctaacaaccgctttcgcaagacattgagaagaatcaacaaaatcctcactagccacaacattcaaatcagtacatgcgataattgcggtatctacttcatccttcaactgcacaatgagcgcgctccataatttgcgagcttcttcaacttctccgcttttaatatacataataatttgattaatcatcgtttgccatttttcataatgaatgtattctatattccgttttgcaatcccgtcttgataaataccagcttgaactgtcgcttccgttgcaagaagagcgactctttttgcagtttcaggaattgcttgtaacgtttcgtcaactatatttaaaatcgggatagaaagagaacgctgtaattcttcaaaataaagatgcgccgtattgcacggcatagcgataaagcttgcgccagtactttcaagtttttgtgctccttcaataatcgcttttttcatcgcttcgtgatcaatagggcgatccatgtaaaacggtgttgggcacgaataaatcatcatatgaggaaagtccatatcatgctttgctccgtatattgtttggcaccctgctacaactgtatcgacgaatggtccagttgattttggccccattcctgctagtattccgatcattgtctcgtctcctttaagaatgtttatatccattatataggagaataacaaaaagacgtgcagtgagtgcacgtctttttttgttatgttttgtcgaatcgtcgatatatccgagaaatcgttgatatattgtaagttatgatagatatatcgaaaaaatcgtttatatatcccgagttacgatagatataattgaaaaatcgttgatatattaccccgcattaacgggcagtaaaactcccaccttaaaattcgcctggagcaaagaagttagttgggaaataaactgcccataaatgcccgattggttcaactaataatcagtggggattccccccactgattaaagtttcactttatcgtttctcaatcgccacaataaatggcgggttgttttgttggttaatgaagccatatcgcagtacgtgagcttgtttttggtctagctcttctgcaaatttgagaacagcgtcgcgttctacttgtccttctgggtgtccgtggtaagtgacgaggacgatgataccttcaggtgccattacttctagtaattgttcaattgccgaaattgttgagttcggttttgtaacgatatgcttgtcaccgccaggaaggtaacctaagttgaagatagcgcctgttacttttccttttgcgtcttctggtagtacggatagaagtgtatcgtgactatcgtgaactaaaacagtacgttcaaaaagttctttttcttttagacgagttgttgagctttcaatcgcttctttttgaatatcaaatccaaatacttttccgctatccccaacaatttcagctaggaagcaagtgtcatgaccatttccaagtgttgcatctacagcgtagtcgccttctttaacagccgtttgcagcagtgtgcgagcaaacggtaatacacgttctaatttcattgttgtttctcctcatttgcatattttccttgccagcttccgcggcgtacaaattctgcatcgatggaatttaatacttcccatttatttaagctccacattggaccaatcattaaatcaggtgggccgtcacctgtgatacggtgcacaattacgtcttctggaataatttcaagttggtcaacaacaagacttacgtaatcctcaagagaaaggaattcgagttgtcctttttcatattgcttcaccattggcgttccttttaataagtgaagtaagtggattttaattccttgtacatcaagtttcgctacttcacgagctgtttccatcatcatgtcgtaatcttcaagtggaagaccgttaataatatgagagcaaactctaatgccgtgcttacgtaatttatttacgccttccacgtaagacggataatcgtgagcgcgattaataaggtttgcagtgcgttcatgaacggtttgtagtccaagttcaacccaaagatacgtacgtttatttaagtccgctaaatattcaacgacatcgtctggtaaacaatctggacgagttgcgatagaaagaccgacaacatctttttctgctagaagcggttcgaatttttcttttaacacttcaagtggtgcgtgtgtatttgtgtacgcttggaaataagcgatacattttccatctttccactttgagcgcattttttctttcatttcatgatattgtgttataacatcatcgcggcgatcaccagcgaagtcgccagatccggcagcgctgcaaaatgtacaaccaccgtaagcaactgtaccatcacggttcggacaatcgaagccagcatctaatgaaactttaaagattttttcaccaaattcatttcgtaaatggtaattccatgtatgataacgtttattgtcgtttgtatatggaaaagggttttgaaccttcattattttccctcctaagccgagtcaaaatgaaacaaaatccattataacatactcataaggtagagatggaagggacacactaaaggggaattgaagcaaggagggacaattatggcagagcgtcaatcacttgaatcgtatattacacaagcggaacaagcggtggaatatgcaaaagaacaattagaacaaggcatgagacaagagcattacaatacgatggagtattcagatgcacagttacaattagaacaagcgtataacgatttacaaacgatgcaacaacatgcgaatgatgagcaacgtgagcaattaaatagagcacgtatggcaattcgccaattgcaacatcaaatgattattacaccgcactaataaggagtgaatgtaatggcgaaacgttcagatcaaaataacccagagcaaaaaacacaaaatggacataacgctgagttttcgaatgaacttgatcccattgttcaagtaaaacagcgtaatagtaaaaaaggacaacctcaaaaatcaaaacaatcagagtaaaccaggtcgaaatatgacctggttttattttgctatatgacaatagtgtaagatttctgtaaggtttgccgatagttgtaattgtccttttccagtagagtaagggaggattaaattttggacaaggagctgctttatggggaacaatattacaaacaaacgaattgatgagttagattacattcgtggcttcgcattactggggattattttagtaaatattttagcactacttaatattaaaactccagatcctaatacagtagatgctagctatcaaaggtttctatacttatttgtagaaggtcgtttcttctcgattttctcattcttatttggagtgggattctatatcttcattacaagagcgattgcgaaagggaaaaatggatatgttctatttttccgccgcgtagttgcattatttatttttggtttaattcatcaaatgtttcagcctggagaagcactagcgttatacgcaatttgtgggttaatcgttttgccgttttataaagcgaaaaaagaagtgaacctagcactaggacttattttgacaattgccttcagtgtaatgggagttaaagaactattaccacttggcttaattttattaggacttgctgcaggacaatatcgtgtatttgaaaatctttcaaaaaacataaagcaagtcgctatttttacaggcattatgtttgttttaagtgtggcagctgtatggtatcaatatggacacgtgcctgctggcccatttgtaaatatgatattgatgaatgaagatggaacaatggatgctgcaagccagtttctaaaaattggtattaatgttggaccaattatttcagctttctatgtaggagcattaattttattacttcagttaaaaccagttcaaacattattagcaccattgaaatactacggtcgtatggctttaacaaattatatcggacaaacggcaatgattttaattgctggtagtgtatttaactttgcaggtaacttaacatacatgcagacgctatatgtatgtatcgcaatttatgcaattcaaattgtgtttagtgtaatttggatgaaaatctttaaaatgggtccattagaatgggtttggcgtgttattacgtactggacggtaacacctttaaagaaataaagtgaaactttaatcagtgggctgttcctttcgcggaacagcctatttttattgtcatcttttgtcgataagtcgatatattttggtaatcgctgataaaagtgtaagaatcgccgatatatttgaaaaatcgctgataaaagtgtaagaaccgctgatatattttaacaatcgccgatataatttcatttaccgatttactatgtcgaaatgtgaactagtatgaaaagccaaccttacacgcatccattttctatcttacaaaagtgtaaggtaattgtaatgttaacaaatagcagttcacttctaaaaagcgcaaaataggtaatggaaaaacaagcgtaggaggatatatatgacgaaaccagttgtagacgtgaaaaacgttcaaaaagtgtacggtaaaaaaggtgagaaccaatcacacgcgttaaaaggtgtatcattctcaattcaagagggtgagtttgttggaattatgggaccatctggttctggtaaaacgacattattaaatgtaatttcaacgttagataaggcaacgggcggcgttgttgaaattgcgggaacggatattacaaaaatgaagcaaggtgagctttcagatttccgttcgcaaaaattaggatttatcttccaagattttaacttattagagaacttatctatttatgaaaacattgcacttccactttctcttcaaggtgtcgcatcacgtaacattggaccaaaagtcgagaaagtagcggatatgttaggaattacagaaatacttcaaaagtacccatctgaagtatctggtgggcaaaagcaacgttcggcagcagcgcgtgctttagtgcatgagccggcaattattttaggggacgagccaacaggagcgcttgattctaaaaatgcaacgagtttacttgatgcgatgacaaacttaaataaagatcaaggcgtatcgattatgatggttacgcatgatccatatagcgcaagttactgtcagcgtattttattcattcaagatggtgagctatataaagaaattcatcgcggtggtacgcgtgaagagttctacaaagaaattttagatgtacttgcagatttaggtacacaaaaggcgtaagaaaggaggttccagtatgttatttaaactttccatgtcggggctgaaaagtaagctgaaagattatatcgtcttacttgtcggtcttgtcatgtcgatttcaattttttacatgttccaaacgttagcactgaataaagcatttttagaatctaattcagtgattaaatctattggattcgtattccaagcaggatcatttttattagcaattataacgttcttctacattttatatgcaaactctttcttattatctcttcgtcaaaaagagttcggtatgtatatgatgttaggtgcgaaaaaacataaagttacattacttatgtttattgaaacaatcgtattaggtgctgcgtctcttgcaattgggattgcagttggagtaggacttgcagaaggtattggacagttattaatgaaacagcttgaatttgctggtgaagggtataaagcattttatctaccatctatgactgttacttgcatcttcttctttgcactatttgtattatcagcaattatgaacagtattaaattgtcacgtatttctgtattgcaactagtacatgcagatgcacaaacagagcgtgttgcagtaaaaggtaaaaagacagttgtagtggcattccttgctgttattttattaggtataggttatgcatctatgatctatatggaaaaactaaaagagatgggaatccttattgcattaattacaacgacagctggtacttacatgctatttggctcacttcttccagtcattattaaaaagttaaaaagtaataaaaagcgtagtgaaaaaggacttaatgcttttacatttgcacaattaaacttccgaattaatagtttaacaaaagtacttgcaacagtggcaatgttagttgcacttggagctggtgcaatttcgggcggtatggcgttcaaaaataacgttataaaaatggtagatggtttagtaatatatgattcagtagttcataatccaacagctgaagaaaagaaaattttagatggtattacatttaaagagaaaagcgaatatcgttataaagttgatgataaatacgtttactatgtaaaagaagatttagagaaaaatcgtcctttcgtaaaagatatggcaaagatgaagtctatgaaggatttagtaaatacgaaaaaagtttcagaggaactaccggtaggtgcagtttctagagagatgaatcaaaaagatgcgaatactaaagaactttcagcggaatggacagatgcttttagtacaatccatccatattatttatacaatgatcatgcaattaaaattgtagatcaaaaaatgtacgatgggataaatggtaaagaaggtatagcatttatcggaaaaacagatgattttttaacatataaaaaagaatggaaaaaacttgacgagttgcagctagataaatataaaaatgtaaaagttgaacaaatggatagtaaatatcaagcttatagtgggttctatggcattgcgagtggaacagtatttatggggttcttccttggaattgcgttcttagcaatgatggcaagctgccttatgtttaaaattctttctggtgcatcaaaagatattacgcgttatcaaatgctgcgtaaaatcggtgtgcgccgtgagttactaacgaaatcgatttataaagagctattcttagtattcttattcccagcaattgtgggtatcgctcacgtattagttggtatgaatattttcggatttattttaatcgatccgtacttccgtatttgggtaccaattgtaattttcgtagttatttatgcgatttattacttcattacagttcaattgtataaaggaattgttcttccgaaagaagattaataataaaaaccgagcaaaaacgctcggtttttattattttcagaaaaaatactttaatgttactgaaatgtataatataatgtaagtaagtaacgtaatataaaagtagaagtagctgtataaggaaaggaggaatccaatctgtagaaagaagctgaacttttatccccacatttttttaccgcaacgtatttatacaatcgtaagtttccacattgaaagttttcagaaccacctgagtatattgtgaaaataatggataacacatggaaatctcatagcatgataaggtaaaatggacaacataatgagaaaattaccgttcataagatgaggagaatacatgtatggaagttgtagaggcattaaaagatataagccaaattgaggctatgaaaaaatatttaaaagagcactcccagcgagattatcttttatttgttattggaattaacacaggattaaaaattacagaactacttagcatgaaatttgaagatgtattaaatgaagacgggactgttaaagagttttatgctcttcctgtgaaagatgaaaaatttaaacaagatatttatttaaatacaaaagtaaaagaagcgcttttagattacgtacaatctattggcgttaaaagagaaaattacgtatttcaatctaataaaacgccaaattcaattacgcgccaacaagcgtatcgtgtaattcataatgctgcagaagcagttggagttgttggtaaaatcggaacgaattcaatgcgaaaaacgttcggatttcatgcgtacaaaagagggatagcgattgcgctattgcaaaaacattttcatcacgcgactccatcagagacactaaagtatttaggtatctcaaaggatgagagctttaaaacggagattgatgtcgatttataaaagccgtaactaaaaaattaggaggcggaaaatatgaatattagagagagtgaactgccgggtattggatgtaagtttgaagtgattacaaaaggtaatgaaaagatggttatcgttattcatgatgatggccgaagagaaatgtaccattttgatgctgatcatgaagagagtatttcaagcgtctctcttcgtgattctgaagcgagacaaattgcagctatattgggcggaatggtatataggccacaagctttagatacgattgaaatggcttttgagggattatcaattgagtggtttaaggtggaaaataatgcaccagttgtacaaaaaacaattggtagtttacatgttcgaaacacatataacgtaacgattattgccattttgaaaaagaatatgaagaagttctttaatccaggcccagattctatcattgaagctggcgatatgctcgtattatcaggtgaaagacatgaagtgaaaagaattattaatgagttgctttcagtaggaggggattcataatcgatggatactttaatctttgaagttggaactgcgttagtattagtcgcttttgcagctattctcgctgcaaagttaaagttctcgattattccgtttcttattatactcggtatgctagtggggcctcatgccccagatttagggcttatcgatttaagatttattgaaagtggagaagttatttccttcctcggccgtgttggcgtcatattcctcctattttacttaggtttagaattctcaattaaaaaattaattaaatcaggaaaatcaattgcttttgggggaactgttcatatatcgcttaattttatattaggtttactttacggatatataatgggtttccccttattagaaacattaattattgctgggatcataacaatttcatcgagtgcaattgttgcgaaagtaattgttgatttaagaagatctggtaataaagagacggagctaattttaggaatcattatgtttgatgatatctttttagcggtatatttatcagtcgtttcaggattagtacttggaggggcaacatcatttgtaggtgctcttacatctattttaatcgcagtaggttatatgctactattctttgtagttgctaggaaagctacacggtttttaaataaaatgttagatatttcgtccaatgaaatttttattattgtaatattcgctattttgttctttgtagcaggattttcagaaacgattcatgttgcagaggcaattggagcattattactaggactcgttttttctgaaacagagcatagtgatcgaattgaacagcttgtcgttccgtttcgtgatttctttggagctatattctttttcagcttcggtttaagtatagacccattttcacttggcggagcagtgtggttggcattaggagcagttttcattactcttatcggtaattttactgctggaatggttgcggggcgtaaagctgggttatcgcataaggcttctacgaatatcggtttaacacttgtatcacgcggagaattttctattatcgtcgcgaatattggaattgcgggtggcttaatggcagcgattaaaccgttctcagctttgtatgttttaatattagcatcgttaggacctttgttaacgaaagaatctgggagaatatactcgctactagataaggtgtttaaatggagtgctaaagaacgtgtgaagcgagaaaaggaagttggatagtacaaataagggtagactgcatgaaaatttcatgcagtctacccttttatatattgttactgttgtcgttttttgtcggtaagtcgatatattttaataatcgctgatatatttgtagttgcgccgatatattctgataatcgctgatataatccaagaagcaaccaatataaattcatttaccgacgaactattatctgaatttcatcaactattaatcagttgccttcctatttaaaaacgactacaattttactgttatatatatgaacgaaaaaaatagaataggaggggaagctatgccaaggaaagtatggctattagtagctgggatgattattaatgtcacgggtgcttcttttttatggccttttaatacaatttatttacatgatcacttgggaaaatctttatctgtggccggaatggtattaatgatcaactcgcttactggtgtaatcggaaacttgctcggcggtgttttatttgataaatggggcggttataaatcaactttagtagggattgtgattacacttgtatcaattttaggtcttgtgttcttccacggttggccgttatatgttgtatggctagcgttaatcggcttcggttctggaatggtcttcccatcgatgtatgcgatggttggtacggtttggccagaaggcggaagacgggcatttaatgcgatgtacgttggacaaaatgttggtattgcgatcggaacagcatgtggtggattagttgcatcgtatcgttttgattatattttcttagcgaactttattttatactttgttttcttcttaattgcttttattggattccgcggtatggaagacaagaaagagccaggagtgcaaaaagaagtcgaaacgaaaaaagggtggtcacttacacctggatttaaagcacttcttatcgtgtgtgtagcatatgctttatgctgggttacatacgtacagtggcaaggagcgattgcaacacatatgcaagaattgaatattagccttcgtcactatagtttattatggacgataaacggagcgatgattgtttgtgcgcagccacttgttagtatgctaattcgctggatgaagcgttctttaaaacagcaaattatgattggaatcttcatttttgcagcttcattcattgtgttaagtcaagcgcaacaatttacgatgttcctcgttgcgatggtaacattaacaataggtgagttatttgtatggcctgcggttccaacgattgcaaatatacttgcaccaaaagataaattaggtttttatcaaggggttgtaaatagtgcggcgactgtagggaaaatgttcgggccagtcgttggcggagcaattgtggatttatacaatatggaagtattgtttatagcaatcatggtaatgcttgtagtagcgcttatagcaacgagcatttatgataaacgagtaaaagtagaagaaacagttgaagaaaaaattgcagtttagtttgacggaacatgtaacatgttttagaatatatttaaataaaacaacctttagaacaagggagatagctcggctgtcttaagatgaattcgttagttattaagagtaacgattaaccgagaagtcctcgctttaagtaagctcttaagagatactaggtgaaggatagttcacgtaacttatatgtgtaataacagtgagaaggagtagtagtaatagaagctggtttagagagttgacggtcggtgcaagtcaatccacgtttcgttatgaactcgcctttgagttgcagttgtgaaactaatagtagcaattgccgttaatccacgttacggatctaagcgaatgtatatttgtacattaatttagggtggtaccgcgggaatctataacctctcgtccctttttagggatgagaggttttttgtattttgggcggtgaaaataaatagaatttcaaggagggtatctcatgagctttaatcatcaagaaattgagaagaagtggcaagggtactgggaagagaataaaacattccgtacgccagatgagacagaaaaaccaaaattttatgcactagatatgttcccatatccatcaggtgcaggcttacacgtaggacatccagaaggttatacagcgacagatattttatctcgtatgaagcgtatgcaaggatataacgttcttcatccaatgggatgggatgcatttggtcttccagcagagcaatatgcacttgatactggaaacagcccagctgaatttacagagcataatattaatacgttccgtaaccaaattaaatcattaggtttctcttacgattgggaccgtgaagtaaatacaacagatccaaactactataagtggacgcaatggatcttcctaaaactatttgaaaaaggcttagcttacgttgatgaagtacctgtaaactggtgcccagcacttggtacagtacttgcaaacgaagaaatcattgacggtaagagtgagcgtggtggacatccagttgagcgtcgtccgatgagacagtggatgttaaaaattacagcttacggagatcgtctattagaagatctagatgagcttgattggcctgaaagcttaaaagatatgcaacgtaactggatcggtcgttctgaaggtgcagaagtacacttcaacatcgatggtacagacgagaaattcacagttttcacaacacgccctgatacattatttggtgcaacatactgtgtactagctccagaacatgcacttgttgcagaaattacaacagcagaacaaaaagaagcggtagaagcttacattaacgctgtaaaaatgaagagtgatctagagcgtacagaacttgcgaaagaaaaaactggtgtattcactggtgcttacgcaattaacccagtaaacggtgagaaattaccaatctggattgctgactatgttcttgcaacttacggaacaggtgctgtaatggcagttccagctcacgatgagcgtgactatgaattcgcatcagtatttaatcttccaatgaaggaagttgtaaaaggcggagatattacgaaagaagtgtacacaggtgatggtgcacacgtaaactcagcattccttgatggtttaaataaagaagaagcaatcgcaaaaatgattgaatggcttgaagtaacgagcgcaggaaatcaaaaagtaacgtaccgtctacgtgactggttattcagccgtcaacgttactggggtgagccaattccagtaattcactgggaagatggtacaatgacagctgtgaaagaagaggaattaccattagttcttccgaaaacagaaaacatccgtccttcaggtacaggtgaatcaccacttgctaacattgacgagtgggtaaatgttgttgatcctgagactggtaaaaaaggtcgtcgtgaaacaaatacaatgccgcaatgggctggtagctgttggtattacctacgttacatcgatccaaacaatagcgaagcacttgtagatcctgaaaaagtaaaacaatggcttccagttgatatttatatcggtggtgcagagcacgctgtacttcacttactatatgctcgtttctggcataaagtattatacgatatcggtgtagttccaacgaaagaaccgttccaacaattattcaaccaaggtatgattctaggtgaaaacaacgagaaaatgagtaaatcaaaaggtaacgttgtaaaccctgatgatatcgtagcaagccacggtgcagatacacttcgtctatacgaaatgttcatgggaccattagatgcttcaatcgcttggtctgaaaatggtcttgacggagctcgtcgtttcctagaccgcgtatggcgtctattcgttcaagataacggtgaattaagtgagaaaattactgacgcaccaaataaagagcttgaaaaagcttaccatcaaacagtgaagaaagtaacagaagactatgcagagcttcgcttcaacacagcgatttctcaaatgatggtattcatcaatgatgcatacaaagctgaaacacttccaagagaatatgtagaaggtttcgtaaaaatgattgcaccagttgcacctcatatcggggaagagctatggagcaaacttggatacaatgaaacaatcacatatgcaagctggccaacatttgatgagtctaaacttgtagaagatgaagttgaaatcgttgttcaagttatgggtaaagttcgcgcaaaactaacaatgagtaaagacgcatcaaaagaagaaatggaacaacttgcacttgaagcaattcaagaccaaattgaagggaaaacagttcgtaaagtaattgttgttcctggaaaacttgttaacgttgttgcaaactaaatcatttgaaaaagctcagagcgtttatgttctgagcttttttgtatagaaaataatctcagggtcaccttcatctaagttttcaactattccgctacgtataaaaccattcgagttaaatactttctgcatactttcattcgattcgttcgttgaagaaaatattttttgagtaggagaatgacttaacatatatgagattaacgagcttgcatagccttgccttcttttagttggtgaaacaatgattaatgagaggaaagtacaaccaaagaaatttgtatcgtatgttagaaagccagagatagaattttcttctgttacaatgatgcatctgccttcacggatagtgtgcttaatataatttcgtctactatcgtttccaattacgtcaatatctatatggacgattgaatctaaatcattgatagaagcctttgttacattcttcaatataaatacctcctagaaaaaatattcagttaattaattttatcatgaatgaagaaaaagaagcggaattctagtgcagacaaacacctattcttctataggaaatatgataaaaaaggtaggctaaattgagtagaagaggtgaaaggaatgaaagggatggacaataatgcaccacatggtttcttcgggagtggatcggatagttatgaacaaatgatgttaatgggaggaggacaacaaggatacggtggaattccgagctggatgggcggaacacctggagggttttctacatcagtagcgggtgtacaaactggaattccaacattaacaggaggatttccatcatcggtagccggagtgcaaactggaatcccaacatttgttggcggagcagcgggaggagtaccagtaggcgtaccaactgcatttccatctttcgttggaggagtacagacaggatttcctgtaccgggagtaggtgttgtagcaggaggagtaggtggatatccgcaagtagttcacggctaccatggtcatcatcaccaccatcaaggtcaacatggccatcatggacatcaccaccatcaaggtcaacacggccatcatggacatcaccaccatcaaggtcaacacggccatcaaggtcatcaccaccatcaaggtcaacacggccatcatggtcatcaggggcaacaagtacatcaccacggtcaccaccacattcatccgcaagctgttctttatcaaactcaccaaggccaacatggtcaccatggacatcaccaccaaggccaacatcatggacaccaaggtcaccaccatcaccaaggtcatcaaggccaacacggtcatcaaggtcaacacggccaacatcatggacaccaaggtcaacatcatggacaccaaggtcaacatcatggacaccaaggtcaacatcatggataccaaggtcaacagcaccaacagcaccaacaatatcagcaatatcaacaacaacaacaatcttctccttggacaggtggaattggagcaggaggagcaggggcagcagcaggagcagctagtattagtggagcagcaggacacgcagggcacgtgggtcattaatgattggcagaaaaaaagccataataaaaaactgctaggaaatcctagcagtttttttcagcttcttgacgctgacgttcaatttcagcacgaagttgtggttccggtgcttgccagccttctggctttagaatcttaccgtcgccttcacggaatcgaggtttcccatcagggaatagttttgccatgttggcgttgtttacaatttcgaatcctttatctggacgtacacccatttcggcaaacgttccgaatgcaaagtaaataaggtcaattagtgcatcgtattgatcttcaacagtcgttgcctctagaaattcttctagttcttcctgcataaaacttgcacggatttttgcacgctcttctgttaattttgttggagtatttgtcacaggatgtccgaatacttcatgcattttcgcaacaagttcgtatcctttatctaaacctttttcgtttgtcatgttgtttcatcctttcttacgttatgccgaagtttattgtaacataaggtgattatgaaatgaaaagaacatcttattgaaataagatgttcgctcgttattcttctttttttattaaaagcgatgaaataagatcgatgccaaaaataccgacgagtaacattggtataacgacaagcaagtaacgtgtgaaggaaacattttttaagtatgtatgagcaaataaaaagacgccgagaaataaaataccatttaaaataggctttactaattttttagacataagctcccccataaatatcttctctctctatctaaaataaaaactcctctctccgttgtatcatgctggagagaggagttcaatcatttctcattcaattacaccagaatttgtaatattcacggtgtattttatatgaactggaacatctttatacatttgtctccattcttctaatttgaatgggcgataatgttgcttatactttgcacctagcccgagaggatcgacgcctaaagatttaaattgcttaattaacttagcagcttgtttatctaattgtttttggacatctttttcaatgttttttgtgttcttgttattttctaagttaatttgctttgatagttcttgaatacgtgcgtcaagacgaacgtgaatgaaaaaagaaggctttccgtttttaatttttatatcgtaagttggaacagaacgaatattattaatcattacgtacgcagaatctgttttaaattcatgtgaatctaatttatgtttctctaatagtcctttaaatatgaacatatctttttccgcaattttaccgatatatttatcctttttaaaaagaccaattccagtgatttttattttatcaccatgcttctttagaatgggaatatagtagtcttgcccttcttgataataacgaaatgctcctacatgcagattatccgttggtaaaggaccggtctccatattatgttctaacaacttttttatataaattgcaacgttgtatgaagtggaatatttgccttttaaaagttcagtaccattcccctctaataaagcggcatataaagcgttccctatattcacatctcgaagtaatgtatcgaatgaagtagacattcctgttttggcaagtcttatcgtatatagagcgacacgcatttgtccactagcaaaaggttgagaagattctaatgatgtatctgcttttacttgttttaccgcatttgcagttccttcaaaaacttgaactttatttccttttttctgaatggggcaaacgaatgtcacttttactttgttgccttttgcaacgtcaaatacggatccttgaataagttgtacatcgtcgataatatttttttgtaaacatccaattagactgaagaatgttatacaagaaataagtattaatttgcttgtgcttttgattttttccattttcttttcacccacacaataataaataggattgggatgtatacataaatgagccaaaaactaacctttgatacattactaataaagttattaatatcgtgtctgtttgttaaaagttgtgaaacaatgagggtgataaggataaaagcgattaaaacccctctttgttttacacggaatatttcatgagttgctctcattgacgcccataaagggaggataaaacttgaaataataacgagtgcgtagcctgaaattgcaatatattcgagtctttctataaatggtaattgaatgacttgggtcatagaaagttgtgcccatatcgtttttaataattgtttttcactaaaaaatgcaaaggctaaaagggtgctaaataaatatagaagatttgaaaatagtgctccaagctgagcgtatttatgagattgcataggctttttcacaaatggatataccatgaggtaaatctcaaaaccggtcatactgtagattgacagttgagcggattttaaaatgtctgaaaaagaatgtgtgaatataggtagtaaattatcccaatgtgaatatttcaaaacgaataagcttagaaataaatatcctaatgtaccaccaacagagatgacacaaatgccagtaatgacacgaaatccagaagagataatgtaatagctaactaagcataaaaagagtgttaacataaaggtggaagcggtaggaaacatccatacttgaataatttcaacatatgttcgaataaccgaaatgctgacgtttaaaaaataagctgcaaagatgatattaaagatattccctatccactttccgaacgtttgcctttgtaaatcaattaaatttccatttgtttcttttaataaaaaatacatcatccatataaggagatggatacagagtcccgtgattagaacgcccatccatccgtcgtatccagcggcctttgcgatgattcgagcgaagccgagaacgccagcaccaaactgtgcaccgtgaattaagaagaaaacaaagacaggagatatttgatatttttcttgaactttactcatcaatgcacctcatttcttaatcatcaaaatccgatctatgttttgttgaaattcctttcgcagctttttttacatgttgtggtcttgcttgtacatctcttgtatcaatcattgttaaaggaaaacggatccaagaatctttaacagattgttgtcttgttggatagaacaaagcgtacggcttgcgtaaagaagtaagtctaaacagatgggtgaataaaaagataaatccaagtgaaataccgaaaagtcctcctatttctgcaaatatgagaaacgggaaacgtagtaatcgaaccgcattacccattttataaataggtgtaataaaggaagcgagtgctgataaggcaacgataattaataaaatattactcgttaaacctgcttgtacagatgcttgcccgattacgataccccctacgataccgagcgtttgaccaactttcatcggtaaccttgcgccggcttctcttaataaatcaattgcaagttctaaaaagagagcttcaattaaaggcgggaacggtacttgtgctcttgataaaattaaagtttcaagtaaatcactcggaataagttcataatgataatttaaaactgcaacgtataacggtgtagcgcaaattgaaaatagaacggcaattaatcttaaaacccttgaaaatgtagcgtacatccaggagacgttatagtcttctggtgaaatgaaaaaatcgaaataggataccggtgttagtaaaacactcggagaaccatcaacaaaaatagcaattttcccatcaataagcgcttttgtaactctatcagtacgttctgtattgatatatagagggaaaattgatttttcacccatcaattcttgtatataagcactatcattaatttgatcatattcaagagcgcgtaatgattcctcgagaaaatctacattatctttttcagcgaggttgtctaaatacatcatgacaactttcgttttggaaaactcgccgataatcatttcttttgtttgtaaatctaaaacaggcagacgttttcgaactaaattaatgtttgtatcaatagcctctacgaaaccttcttgcggaccaataacagttgattcgtttaaaggaggggttggtgcacgataattatcaattgcaatgtttgcaagcatacatttttgatcttgctgattcaattgaatgatcgcatgtccctttaaaaccatgtcttcaattttttgcaagtcgttcgtaattgtaatgccactcatcggaatatgttcttttagttcttctagcgaagtacaaggtctctctaaaagagtaggcattaaatatttttgtaatttctccccatcaagtgaagggcgatagtaagaaatccaataaggcatcgtttcatcgtcagatgtatggtaattaataaaatcactagactttttaagtttctctattaaatcttgtagagaatgaatacggtctttttctggttttgtaaagtcataaatactattacctccagagctttgttgcttactttgagaaggttcatcttgcttagcgttttgttgtttatcttgagacgaatcaccttgtttagcactttgttgtttatcttgagatgaatcatcttgtttagcactttgttgcctatcttgagacgaatcatcctgtttagagctttgttgcttatcctgaaacgaatcatcttgtttagagctttgttgcttatcctgaaacgaatcatcttgtttagcgctttgttgcttatcctgaaatgaatcatcttgtttagcactttgttgcctatcttgagatgaatcattctgtttagcgctttgttgtttatcctgtgaagattcatctcgtttagatttttgttgtttatcttgagatgaatcatcttgtttagcactttgttgtttatcttgagatgaatcatcttgtttagcactttgttgcctatcttgagacgaatcatcctgtttagagctttgttgcttatcctgaaacgaatcatcttgtttagagctttgttgcttatcctgaaacgaatcatcttgtttagcgctttgttgcttatcctgaaatgaatcatcttgtttagcactttgttgcctatcttgagatgaatcattctgtttagcgctttgttgtttatcctgtgaagattcatctcgtttagatttttgttgtttatcttgagatgaatcatcttgtttagcactttgttgtttatcttgagatgaatcatcttgtttagcactttgttgcctatcttgaaatgaatcattctgtttagcgctttgttgtttatcctgtgaagattcatcttgcttagaactttgttgcttatcctgagaagattcatcttgtttagcgctttgttgtttatcctgagaagaatctttttgctcgttatttttacctttattatgttttatacttctagtctgttctttgttatcatcctcttcattgttagaatgctgctcctggttatctctttcgtttgcttctggtttatttaatttttttttcttacgtaaccaattccaaatcatatgtatgccctctttaatcttgtaatatagtgctattttgtggctaattttgtatattattcatttatttatgaaaagaagaaggagattagttgcatggaaaaaaatctttagtaagcagttcatactataacggggagagggagagtctgtgcaaattgtaaaaaaagagaagtttgttttaaaagagtttacgtttgaaaatggtagggaaattcctgttcaaatgggatacgagacatatggtacgttaaatagagaaaggtcaaatgtgattttggtttgtcattattttagtgcaacaagtcatgcggcgggaaaatatacagtgcatgatgaggagtctggttggtgggatgggctcattggacctgggaaagcaattgatacaaataagtattttgttatatgtacggataatctttgtaatgtgcaggtgaggaatccatatgtgattacaacaggaccgaaatcaattaatccagaaactggagaagaatatgctatggagtttccggtttttacatttcttgatgtagcttgtatgcaatatgagttaataaaaggtatgggaatttcaaggttacacgctgtaatcggaccgtcggcggggggaatgattgcacaacaatgggcggttcactatccacatatggtagagcggatgattggcgttattacgaacccacaaaatccaattattacgtcagtaaacgtagcgcaaaatgcgattgaagcaattcaactggatccaagttggaaagatggaaaatatggagaacagcaaccgataaaggggcttcatttagcaaatagaatgatgtttatgaacgcgtttgatgagcatttttatgaaatgacatttcctcgtaatagtatagaggtagaaccttatgaaaagttttctacactaacatcatttgaaaaagagataaataaagcgacatatacaagtttagagctagtagatgcaaattcatggatgtatactgcgaaggcagttttattgcatgatattgcacatgggttttcttcactagaagaatctctttctaacatagaagcgaatgtgcttatgattccgtgtaaacaagatttgcttcagccgtctcgttataattataaaatggtagatattttgcaaaaacaagggaaatatgcggaagtatatgagatagaaagtataaatgggcatatggcaggagcacttgatatttatttatttgaaaaaaaagtttatgaatttttgaatcggaaagtatctagttttgtgtagaagaaaaatgatggggaaaaggtgcaatgtttgtagtaggcaccttttttcacatgatttgtagacggaaaatatatgtagctattgctataccaaagaacgctatgctaagcaatagaaataagaatgacatttcttgtgaggattttatttttttattatttttcatactgagagtaataattgcagcgattaagaaaatgatgcccataatgaaaagggaaagtgtcattttcattggctcctttcataaaacaagtatattgaggatacaatgcaagagttatgtttgtaaagaataagttttgcgggaaaattgagaaatagtttttcgattctttgcgttctttcttttgcatgctaaaattggtagagaatgtttgtgaaaaagaaactaaaggttttattgtatataaggaggaactacatatgacagaagttaaaacaattactacagaagaagtgcaagagcgtttagaaaatggagaaacgttatttttagtggacgtaagagaagatgaagaagtagcggcagggaaaattccagaagctgtacatattaaaatgggtgatatcccacataaagtagatttctttaataaagagaatgaatatatctttatttgtcgttcaggaatgcgcagtgaaaatgtatgtcattatttaaatgagcaaggatttaaaacagtgaacatggtcggcggtatgcttcaatatgaaggtgaaacgaaatagtaaatagttaaaaacttgaaacgagtatgtttcaagttttttttcttttgcatacagtatataaaaggaggatggagaagatgggaattaacatgcgtaaagtaaaaattataaataatacaggagctgttaatgttggcgattgttatgatctctcaccttttgctgtatcaaaagcgtatgcgggtgccggaggggcgagtgcggctatttttttaaatgggaaaaggcagccagaagcggtaattagaacatcagtatttcttccaccattagcaacaagtacacgtacgttaggttcgtaaaggaaaggtagtgtgtaagtatgccggcacatataaaagagtttgttatcgttaataatacaggaaatatatttacgggcgataatttaagagacacttcatttactgcttcgaaatcgtatagtggttcaatggggtgtacttggattgatgttgttactgtaatagggacggagacaaagctttgtttacagccaggagattctgtcacaacaacgtatacgagaggtactcctgctggtactgtaacaggaacgaatactgggcaaggtgcaaatgtgtcgagtactatgcaggcggtgccaaatatagataatatggattcagttgctggactcccttaaggaattaagggagtttttattatttaaaataaaaatagtcttggaaattatttttgaaaatagattaagaagaggtttatttattatgaaaaagaaggtttgtaggtggtgaaagtgtgaagaaacgtgataataatgggaagcaaaattcgttaagctctaattttagaattccacccgaacttattggacctactttccctcctgttccaactggatttacaggtatagggattactggcccaacaggtccacggggtccaactggtcctcaaggaccgagagggttacaaggtccgatgggggagatgggcccgacaggacctcaaggtgtgcaagggatacaaggaccagttggttcaataggtgcaactggaccagaaggacagcagggaccacaagggttaagggggccacaaggagcaacaggagcgacaggtttacaaggggtgcaaggaattcaaggtccgattggttcgacaggagcaactggagcgcaggggatacagggcgtacagggattacaaggtccgattggagctactggacctgagggacctcgaggaatccaaggtgtgcaaggagtgccaggggtaactggtcctcaaggaattcaaggagctcaaggaattcaaggggcacaaggactaactggaagtacggggttaacgggagcaactggtcaggggataacaggcccgactggaataacaggtccaactgggataactggaccatctggaggacctcctggtccgacagggccgactggtgcgacaggtccgggcggtggaccgagtggaagtacaggtgcgactggagcaactgggaatactggagctacaggaagtacaggggtaacaggagcaacgggaagtacaggtcctactggaagcacgggagcacagggcttgcaaggaatccaagggattcaagggattcaagggccaattgggccaacaggtccagaaggtccgcagggtattcaaggtattcctggtccgacgggagtaactggtgaacaaggaatacaaggagttcaaggtattcaaggggtaacgggagcaacaggagatcaaggtccgcaaggtatacaaggggctataggaccacaaggggcaacaggggtaacaggagatcaaggtccacaaggaatacaaggagtaccagggccatcaggagcaacagggccacagggagttgaagggatacaaggtccgatgggtgatataggaccaacaggtccagaaggcccagagggacttcagggcccgcaaggaatacaaggtgttcaagggccagttggagcgacgggtccagagggtcctcaggggatacaaggtattcaaggaccggtaggagcaacaggcccacaaggtccacaagggattcagggaatacaaggtgtgcaagggataacgggagcaacaggagtacaaggagcaactggaattcaagggatacaaggggaaataggagcaacgggtccagagggtccacaaggagtgcaaggtgctcaaggggggattggtccaacaggtccgatgggttcacaaggagtgcaaggaatacaaggaattcaaggcccaacaggtacacaaggagtgcaaggaatacaaggaatacaaggaattcaaggtccgacgggggcaacaggagatacgggagcaaccggggcgacaggggaaggcactacaggcccaacgggagtaaccggtccaacaggcgtgactggcccatctggtggaccagcaggaccgaccggtccaacggggccatcaggtccggcgggagtgacaggtccatctggtggaccacccggcccgacaggagcaaccggggcaacaggagtaacaggagatactggggcgacaggctcaactggagtgacaggagcgacaggagaaacgggagcaaccggagtgacgggtttacaaggtccgcaaggaatccaaggagtgcagggagagataggtccgacgggtccccaaggtgttcaaggtccccaaggaattcaaggagtaacgggggccactggagatcaaggtccgcaagggattcaaggcccacaaggcgacataggtccaactggcccccaaggaattcaaggcccacaaggttctcaaggaatccaaggagcgacagggggaacaggagcacaaggcccacagggaatccaaggtccgcaaggtgacataggtccgactgggtcacaaggtccaactggaatccaagggatacaaggagagataggaccaacaggtccagaaggcccagagggacttcagggcccgcaaggaatacaaggtgttccagggccagttggagcaacgggtccagagggtcctcaggggatacaaggcattcaaggaccggtaggagcaacaggcccacaaggtccacaaggaatacagggaatacaaggtgtgcaagggataacgggagcaactggagcacaaggagcaactggaattcaagggatacaaggggaaataggagcaacgggtccagagggcccccaaggagtgcaaggtatacaaggggcgattggtccaaccggtccgatgggcgcacaaggagtgcaaggaatacaaggggttcaaggagcaacaggtgcacaaggagtgcaaggaccacaaggaattcaagggatacaaggtccgacgggagcaacaggagatacgggggcaaccggagcgacgggagaaggaactaccggcccaacaggagtaactggtccaacaggggtgactggcccgtcaggaggaccagcaggaccgaccggcccgacggggccatcaggtccggcaggagtgacaggtccatcaggtggaccacctggcccgacaggagtaacaggtgcgacaggagtaacaggagataccggggcgacaggctcaactggagcgacaggagcaacgggagcaacaggagtgacgggtttacagggcccgcaaggaatccaaggtgttcaaggagagataggtccaaccggcccacagggtattcaaggtccccaaggaatccaaggagtaacgggggcaacaggagcacaaggtccacaaggaattcaaggcccacaaggagagataggtccaaccggcccccaaggaattcaaggtccacaaggtcctcaaggaatccaaggagtgacaggggcaaccggggcacaaggcccacagggaatccaaggcccgcaaggtgatataggcccgaccggcccacaaggcccccaaggaattcaaggcccgcaaggaattcaaggtccaacgggagctacaggagcaaccggagcgacaggtctccaaggaattcaaggtccccaaggaatccaaggcccgcaaggaattcaaggtccaacgggagctacaggagcaaccggagcgacaggtctccaaggaattcaaggtccccaaggaatccaaggcccgcaaggaattcaaggtccaacgggagctacaggagcaaccggagcgacaggtccccaaggaattcaaggcccgcaaggaatccaaggtccaacgggggctacaggagcaaccggttcacaaggtccaactggagatacaggtccaaccggagctggagccacaggagcgaccggggtgactggagttagtacaactgcaacgtatgcatttgcgaataatacatcaggaaccgctatttccgttttattaggtggtacgaatgtaccattaccgaacaatcaaaatattggtccaggaataaccgttagtggtggaaatactgtatttacagttgcgaatgcaggaaattattatatagcttatacaattaatttaacggcaggattacttgtaagttctcgtataactgtaaatggcagtccgcttgcgggaacgataaacgccccgacagtggctactggttcatttagtgcaacaataattgctaacttgcctgctggagctgctgttagcttacagttatttggagtagttgcaatagctacattatctacagcaacgccaggggctaccctgactattattagattaagttaataagcagagaaccttgaagcttttatgtttcaaggtttttttatctttgtatttgtaagtaaacctcgttaaccagggggagtgaatcccctctaattatttaaagtttcactttattcacttgagcaaaaacatcgcagttcgaaaatatattataatagaatgaaaagaaagaaatttggcagaaagggagggtggcgatgcaggagatggttaaagatttttttggacgcccacttcaagatttacgtatatctgtcattgatcgttgcaattttagatgtacatattgtatgccagcggaaatatttgggccagaatatgcttttttgaaagacgagtttttactaacttttgatgaaattgagcgtttggcaaaattatttgttagcatcggtgtacggaaaattagacttactggcggtgagccactgcttcgtaaagatttaacaaaacttattgcacgtcttgtgaaaattgatgggctaatagatatagggttaacgacaaatgctattcatttaacgaaacaagcgaaggcattaaaagaagctggattacatagagtgaatgttagtttagatgcgatagatgatgacatatttaagaatattaatggtcgaaatattaatacgaaaccggtaattaagggaattatagcagctaaagaggcgggcttggaagtaaaggtaaatatggttgtgaaaaaagggatgaacgatcatcaagtactaccgatggctgcgtattttaaagagcaaggaatcacgcttcggtttattgagtttatggatgttggtagtacaaatgggtggaattttgatcaagtcgttacaaaacgagaattgattgagatgattcataaggtgtatccgcttgagccagctgaagcgcattactttggtgaagttgcgaagcgatatcggtacgttggaacaaatgttgaagttggttttattacatctgtttctgagtcattttgtgtctcttgtacgagggcgagaatttcggcagatggaaagttttatacgtgcttatttgcgacagagggtttggatgtaagagaacttcttagaggaaatctttcggatgaggagttattaagtgttatacaagatgtatggatgaatagaaaagataggtattcggatgaacgaacagaagaaagtgcaaaaaatcgtccaaaaatcgaaatgtcttatataggaggataagaaagggggctatcgcatgcaggagcgatattcaagacaaatattattttctggtgttggagaagaagggcagagaaaaataagagagaagcatgtgcttattattggtgctggtgctctcggtgcggcaaatgcagaagcgattgttagagcgggtgttggaaaagtaacgattgctgatcgtgattatgtagaatggagtaatttacaaagacaacaactatatacagaagaagatgcaaagcagtataaaccgaaggcggtagcggcagcagagcatttaagagcgattaattctgaggtggaaataactccggttgtgacagatgtaacggtgcaagaaatggaagaattagtgaatgatgtagatttaatattagatgcgacagataattttgaaacgcgtcttctcattaatgatatttcacaaaagtataatattccgtggatatatggtgggtgcgttggaagctatggagtaacgtatacaattttaccagggaaaacaccgtgttttcgctgtttaatggagcatccggcgagcggagcaacatgtgacacagctggtattatacaaccggcagtacaattagtagttgcgcatcaaactacggaagcgctgaaaatattagtagaagactacggagcgcttcgtgaaacgatgttatcatttgatctttggaataatcaacagatggcatttaaagtgaataggcagaaaaaagatacttgtttatcttgcggaaggttacgtacatatccgagtttaacatttgaagcacaaacgaaaacagaagtgttatgtgggcgaaatacagtgcaaattcgtccaggtgtgcggaagaattttaatttggaagaaattaaaaagcgcttacaaagaagcgtagagataaaggcgacaccttatttattgtcgtttccggtagaagaatatcgttttgttttatttacagatggcagagctttcattcatgggacgaatgatataaatgtagcgaaaagtttatatgcaagatatataggttgaacctaaagggaatcctttaggttcaacggagaaaggattatgaatttctcgtataatctccactttttccgcctgttttttcaagtaagtacgtttcgccgataatcatacctttatcgacagctttacacatatcatacacagtaagagcggtagccgaagcagctgttaaagcttccatttcaacaccggtgctaccttctgttttaacttttacttcaatgagtaaacgatattgttcttctgattgtttccaatcgaaagaaacgtcaacaccttttaatagtaaaggatggcacattgggataatatcagaagttcgtttcgcagccataatgcctgcgatttgcgcaactgctaatacgtcacctttcccaatttcattgtgagagattttatcgtaaatttctttcgtaacgacaatgctagagcacgcaattgctgttcgaacggttgcttttttgtcacttatatcaaccatcttcgcgcgtccttggtcattaaagtgtgtaaatgaagacatggaattcctccttgaagtaatttctattgaatatataaagtttaatcgagataaaaaaaattgcaaatatgaggtgagaaacgatggtagaaaaacgaattccaattcaagttgctgaggcagtagaacgggtaatgaaatatgcaaagcatggtgaagtagaagaaatttctattacggaaagttacgggagaattctcggggaagatgttgtctcagatcatgacgttcctcattttgatcgttccccttacgatggtttcgccattcgagcagaagatacgaaagaagcaactcaagagaatccagttgaatttgaagtaataggagaaatcggggcaggttctgtttttacagaagaagtaggatcttttcaggtggttcgtattatgacaggagcagctattccaaaagattgcaatgcagtcgtaatgctagagctgacagaagggtttgagaagaacgggaaaacatatatgaagttaaaacgcccttttaataacggtgacaatgtgtcgtttaaaggagaagatataaaacaaaatcaagttctcgttcagaaaggcgttgcaattaatccaggtgttgccgccttattagcaacgtttggatatagcactgtgaaagttgtaaaacagcctgttgtcggtattgtaacgacaggaagtgaattattagaagtacatgagccgttagaaccggggaaaattagaaatagtaactcgtatatgatcgcagctcaaattatgaaagctggcgggaaagttcgttattatggtcaactcgcggatgagttagatgcatgttttacagctgttcaatcagcggtggatgaggtcgacattttaattacaacaggcggtgtatcagtaggagattatgactacttaccagctatttatgaaaggttacaggcaaatgtactctttaataagatagccatgaggcccggaagtgtaacgacagtagctgaagttgatggaaagttactctttggtttatcaggaaatccgtctgcttgttatgtaggctttgaattatttgtgcatccaattataaaaacgtatttgtatgcgaaggaacctcacgtatatagagcggatgctattttacaaaaagattttccaaagccaaatccatttactcgtttcgtaagagcgaacgtaacaattgtggacggggcgttacaagcgatgccagttggtttagataaatcgagtgcggtatcttcacttgcagatgcgaatgcttttatcgtgttacctggaggaacgagaggatttgagaccggaatgaaagtatccgtattattgttagagcactctgagggatgtgattggccatgggcaaagccacttcaatcttacaaatagtaggatatcaaaatagcgggaaaacaacacttgttgagaaagtggtgcatgcattagctgaacgaaaaatgaaagttgctacaattaaacatcacgggcacggaggctttccagaagtagcgcaaaaagatagcgaaagacaccgtaaagctggtgctgtcgtaagtagtgtagaaggtgctggattgctttcactttcttcactaagaaagaaatggtccttgcaagaaattattcgcttatatgagttttttgaagtggatacaattttaatagaaggctataaaaaagagaattactcgaaagtagtgttacttcgttctgcggaagacattgagcttttacataaagtagaaaatattgtggcggttattacgtggtatgatgttccggcaaatatacgagaagaatataaagtatttcatataacagaagaagagttgtacatagactggtttttacaaacggttaggagtgcgaaatgataaatacatattatgaagtaattgatacagaaatctcaattgaagaagtaacgaagaaagtaattcgacgtgaatgcggtgctgttacaacatttattggaacggttagagagtttacgaaagggcgtcgtacattatacttagagtatgttgcttataagacgatggcagaaaagatgctagagaaaattggcttggaagtgaaagagaaatggccaggtacatatgttgcgattacacatcgcatcggtacgttgcaaatttctgatatagcggttgttgttgctgtttcaacaccacaccgtaaagcggcttatgaagcgaacgaatatattatggaacgcataaaacaaattgttccgatttggaaaaaggagttttgggaagatggtgactcatggattggtgatcaattagaaaaaacaccatatccggcgggagagcctgggaaggagctataagtatgattagagtattgttatttgcgcacttgcaagaagaagcagggacaagtgaattacaaatagagaaagaaaatattacggttgcacagttaaaagatgttgttgcgaacgaatataatgtaccagtttcagagccaattatggttgcgattaatgaagaatacgcaaatgaagatgacagggtccaatctggtgatgttgttgcactaattccaccagtgagcggtggttaatattggattcattaaaacgactttcctacatagggaaagtcgtttttttatggcagttttgagaacactaatctatagaacaaggagggaactatgaaaaaaatatgtgtagttatcacaatgctatgtgtggcctttttctcttctccaagcgattctttcgcgaaagaatcaagagaacagcttttagagagtgcattatcaaataggtactattcagttattagacaagtgacagaagatcaatatgaatgtgcttcagttatagatataaagcgtctcggcaagaaagatgaatttgttcctagatacgaagtgaagctacaatttcttacatttcaaggagcgcataatccgccgaacgataaagttacgcttactttggaagaccatttagatcacgtaaagataaagaaagtggagcgagaaaagaatgtttctgacgttattgcagaaaaagtttgtgaacgggaaaaagaaaaaataaaagctcactctaacgacttagagtgataatctatggcatttagtaaagaaaggtaatgagtgatggatatatttttagcgattttaccagctatattttggggaagtattgtgctatttaacgtaaaactgggcgggggcccgtatagtcaaacgctcggaacaacgtttggagcacttattttctcaattgttgtttatatttttatgaagccagtattaacacctaccgttatcggagttggagttgtgtcaggtttattttgggcgcttggtcaggcaaatcaattgaaaagtattgatttaatgggtgtttcgaggacgatgccaatttcaacaggacttcaattagtcgcgacgactttatttggcgttatcgtatttcatgaatggtccacgacaatatcggtcgtccttgggattttagcgctcgtttgtattattatcggtgttattttaacatcgcttcaaagtgaagaagaaaagaatgcagagcaagcagcaaactttaaaagaggtatcgtaattttattaatttcaacagtcggttatttagtttacgtagtagtaattaggttatttaacgtagatggctggtcggctttgttgccacaagcagttggtatggtgttaggtgggattttgcttacctttaaacatcatccatttaataaatatgcaattcgcaatattattccaggattaatttgggcagctggaaatatgtttttattcatttcacagccgcgtgttggagttgcaacaagtttctcgctatcgcaaatgggaattattatttccacgcttggtgggatccttatattaggtgaaaagaaaacgaaacgtcaattaacgggtatcgttgtcggtatcgtttttattatcgcagccggaattatgttaggtatagccaaaagttaaaggaggtatggaaatgtatagtgatttagcagggaaagttgtcgttattacaggatcagcaactggtctcggaagagcgatgggagtgaggtttgctaaggaaaaagcgaaagtggttattaattatcgctcacgagaatcagaagcgaatgatgtgttagaagaaattaaaaaggtaggcggcgaagcgattgctgtaaaaggtgatgtaaccgtcgaatcagatgttgtgaatctcattcaatctgctgtgaaagagtttggtacgcttgacgttatgattaataatgcagggatagaaaacgcggtaccgtcgcatgaaatgccgcttgaagattggaatagggtaattaatacaaatttaacaggtgcttttttaggaagtcgtgaagcgattaaatattttgtagaacatgatattaaagggtctgtcattaatatgtctagtgttcatgagaaaattccgtggccactatttgtgcactatgcagcaagtaagggtggcattaaactgatgacagaaacgttagcgctagaatatgcgccaaaaggtattcgagtaaataatataggaccaggtgcaattaatacgccaatcaatgcagaaaagtttgctgatcctaaaaaacgtgctgacgtagaaagtatgatacctatgggctatattggaaaacctgaagaaatcgcagcagtagcaacttggcttgcttcatcagaggcgagttacgtaacgggaattacgctatttgcagatggtggaatgacgttatatccatcgtttcaagctgggcgtgggtaatataaaaggacgaagagataaaactcttcgtcctttttttacaaaaaaaaatagcggccagctattttaaatttagtgattaattgtatcttgaagaaattctgttgcttgatgttcagtaacattttgtacgagcgcgacttcgctgatcatcatttttcgtgcattatctagcatttgtttttcgctcgcatttaatgttctctctttattacggcgaagtaaatcccgaaccacttctgcgctatcttgtaaattgccatttttcattttttccatattcattgtatatctttgtttccatgagagtgatgggtctgactccccgttttgaaattcaagaagtatatcatctaacgtacctcgatcaacgatataacgaatacctgatttttttaattgatccatcggaagcattacttgcatatctttactaatgatgcgtatcacacaatattgacgtgaagtacctaatatttctttctcttcaattgcttcgatgattcctgcaccgtgcattggataaacgattttatcaccaatttgaaacaaatcatccacctccatatgtggtaaccacttttaatgatagcatacgtatgtaaaaatgtcaaattttatatgataacataatatttatattcgagtcaataagataaagtgcttttttatgtttttttttgaacttatttatcccgcattaacgggcaataagacccccacctcaaaattcagcgaaagcaaagaagttaggtgggtggtcgggctgattaaagtttcactttatagtgatttttttagaaaaatagtacaggtgagaaagagggcatatccacttatttttaagcataaaatgtaaaagcgctaatacaatatacctaaatccgttctttgcaaaggagggagagaaggtggggcgcacaataaaaattgatattacaaataaagttgtagctaaatttagaccaaattatttggaattatatacgagtaaatttatgataggtaagttttatgtctatactgaagataaaaaatatgtgttagaagacggatatatatatgagaatggaaagttttatcgcatcatagatacgcaccgtggcaataatcaagcggcggagggctgcgatctaggatggtgttaacatgattcgtgtgaaagtgtttgatgaaagtcacgaaaaagacttagaagacgctgtgaatgtgtttttgaaaaagattgatgatagcaactttgtagatattaagtatcaagttggtgtttccattaacgacgatgaaaaccaaatttattgtttttcagcaatgatcgtttataaagcataaaaaagagctggctcacccagctcttttttatgttttatgttgggacaacatgtgtcggtaatacgttcataatagattggggtgtgcctaatttctttgtcgttaaaagaggctcccctgtttcatgattttgggcatctttacacataccaaggtgataacgatcacctaaaaatggatcaatataaaaaccgtttttgaatactttatcattcggatgtttttcatgatgaatatcagaacagttaatgcaatagaacatagctttcatcccctttttatttttgtttgaaaaaagtgagtcggtagtcatttcgctcctgaggaaatgttgaggagaagagaaataactacctactcaaatggtgggcatattccttctgatttgtcatatctcgcgtattgtcccttgagggaaggaggagagacgaagtacgcatgatataagtaaggcgcttctttcaatatgaatgatggagtttcatgttgagagaagtttttattttgtattgcctttgtgagtatattatgagggaatgctaagagggtgtttgtcctgttgaaaaaatgttgagaatttctcaacagtaaaagaattggcgttgacatgaaactaaaaggtgttatattatcgaagtataaccaaaaggtgttatgttgtaacgccgagtaaaggagaatgaaaatggaacaacaaaatacattaaatgatattaaacaaacaatcgtttttaacgcgtctattcaaaaggtatggagtgtagtatcaactgcagaagggattgcgtcatggtttatgccaaatgattttgtattagaggtaggacatgaatttcatgtgcaatcaccatttgggccatcaccatgtaaagtgttagaaattgatgagccaaaccatttgtctttctcatgggatacagatggctgggttgtttcatttattttgaaagacttaggagataacaaaacagaatttacgttaattcacggcggctggaaacatcctgatgaaattcttccgaaagcaaatgcgaagagctctattattcgcgatagaatgagcggtggttgggtagcaattgtaaatgaaaaactgaaaaaggttgtcgaaggctaagtgtcctcgtcagcagcgaaatatgatgtatttcaagcaattgctgatccaacccgccgagaagtaatacggttattaagtgacaaagagttaccgatttccaaaataacggatcattttccgatgagtcgtactgcggttgtaaagcaccttcatattctttcggaagcgaatttagtaagtggaagaaaaagcggaagagagaagatatatcgtttgcatccagaaccattagaagaattacaacagtggctctcatattatgaacgtttttgggataataaattatccatgctgaaacatattgtggagaatgaagaataaaaaaaggatgaccaaaatggtcatcctttttattgttgctcacttgtttgtgtagctggctttaataaaagccaaccgataattaatgtacatactgctaatacgaaagtgctcatataaataacgtgtacacttgcagctaatgcggattgtgattcagtggctacacttgctgtagtcccgccgtgtccaccagatacaagatcaaggtttttaatgccgcgtgcatgaatcatcgtattaaagattgttccaaagattgcagcacctaacgtttgactgaatgtattaataaatgtgtttaaaccaacggctgttccgcgtgtatgagctggtacggctgcttgaattgttaccatgtaaatcggtgtcacaagccccattcctaagccgaataatccgactgctacataaataaggaacgatggtgaatttgttgatagtgtaaataataagaacgtagcgactgataaaatgctagctccaagtaaaatgatttgtttcgtttttaatttgcctactaagttaccagagaaaatagcgccaaatgtccacataacagggattggcattaaaataagtccagcttctgtagcatttttccctaatacaccttggctccaaattggaaggtacattgtaatactaataatcattgcgccagcaataagagttaatatatttatcgtagataatgtgcggttagagaaaagtgctagcggaattaatggttctggagattttttctcgatgaataagaaaataataaatgaaatcgcggcaaagattaataggccgataattgtcatgtctccccagttttgcttactgctacctgttaataatgcatatagtagagcgattgtacttaatgagaagactgttgcaccaagataatcgatatgatgcttagcagctttaatagattctttgtagtaaattgcaatcattaagcaagcgataattccgaatggaacgtttaggaagaaaatatagcgccaagaaagggaatcaactaaaaatccacctactaacggtccgataacaccggatacaccccaaacggcactcatccaaccttgtgctttcgcgcggtctttcgcttcgctatataagtctccaataatcgtcattgtgattggcataacagcaccagcaccgataccttgaagcgcgcggaaaaagattaattgttccatcgatgtaacgactccgcaaagtgcagaaccgactaaaaagattgtagctccgatcagtaaaacttttttacggccaaataaatcagcgagctttccgtatattggagtcgaaacagctgttgcaagcatataaattgcatatacccaactaacaagttcgacgcctgacaaatcactcgttatacgagggattgctgtactaacaatcgttccttctaccgcagaaagaaacgtcattaacattaaagacatcatgactttttttctcatttgttttccccttacccttttttaaatattcaacaatataaaatataaaggtactaaggtaaataaagcaacaaaaaagcaatggaaagttacatggagcagatatttgtcgtttcttctcggtaagtcgataaatttggaaaatcgccgatataagttgcagaatcgctgataaatttggggaatcgccgatataagttgcggaatcgctgatatatttgtggaattgctcatataatttcatgtacctataaaaaaagaaacaggaatccctgtttctttttttaatactgcattttcgcgttttctccagctgtcgttccggcaattctaccagtaacaagggctgatgtaatattatagccaccagtataaccgtgaatatcaagaacttctccgcagaaatataagccgttcgtaaatttagaagacatttctttcgggttaatttctttcacggatacaccgccgccagtaacgaatgctttttcaattgactgcgtaccatttacattcacagtaaactctttaaagtctttcacaagtgcacgaatcttttcgtgagaaacttgtccagcttgttcgctaccgtcaatttcatttttttctaataagaataggaagtaacgttcaggaacataaccttttaaaacgtttttaattccttttttcggatcttctttcatttgtttcagcatgcgctgaaatagttgctcactattttcctctggcaatgcatcaatactcatttgtattgtattcgttttaaactttttcagtgctttcacgacgaattgactacagcgaagagcagcgggtccggataggccgaaatgagtgaagagcatgtccattttgtgagaaatgatagcttttcctttcgggtttaatacacttaagtttatatcacgtaaagcaaggccttgtaatgagcggtcacgtataaacggctcgtttgaaaggataggtacttctgttgggaataattctgtgattgtatgacccgctttttcagcccaagcatatccgtctccagtagatccagtttgaggaactgattttccgccaacagcgataacgacgtgatttgtttctaacacttcacctgtttgcagtataactgctttcgtttgaccattttcatattcaatcgtttcaacaggcgtatttgtacgaatttttacacctaagtcttttaatcgtgttaaaagtgcgtctacaacagattgtgctttgtttgacacagggaacatgcgaccgtggtcttcttctttcaatttaacaccaagattttcgaagaatgtaataatatcttcattattaaaaatagaaaaagcgctgtataagaagcgaccgtttcctggtatatgtttaacaatttcatcaagtggtagacggttcgttacgttacagcgtccgccaccagaaattgcaagtttacgcccaagtttatttcctttatcaagaagtaagacatttgcgccttcttctgcagcaccaattgcagccattagcccagaaggaccgccgccgatgacaataacatcataatgcataatatatcgacctcattttctacatttcctgcctaaaagaatagcatgttttcccttaaaagaaaaatagagtgaagtactgcttaatgagagaattgtggtacaatacaaaagttagagttcagcactatcctgccatttgtaggcgataagactaaaacctcaagatttaggagaagtaaatagggagtctgttagcctgtaaatgctcgaatggttcaactaataaggagtaggagagaagtctccaactaattatagtttcactttatgtagatgtaggaggatttttgtatgtccgattcgaaatttctgcgcggaacgcttattgttacgctagggacatttttagtaaagttcttaggcatgatttacgtctttccgtttcatgcattagtaggaacagaaggcggaacgctctatacatatggatacattccatatacgatctttttaagtatcgcaacggcaggtgtgccacttgctgtttcaaaatttgtttccaaatataatgcgcttggcgattataaaacgagccggagaatgttccgctcgggaatggttatgatgatagtaacaggagttctttcgttcctagtactgtacatgacggcgccattgtttgcagaagcgatgcttggtaaacaaagtatacacaataatgtaggagaagttacgacgattattcgtcttgtaagtttcgcacttattgttgtaccagcagcgagtttaattcgtggttatttccaaggtcaccagtctatgggaccaactaccgtttcacaaattattgaacaaattattcgtatcgtctttttattagcaggtagttttatcgttattaaagtacttggcggtacagttgcaacagcagttggagtagcgacatttgctgcgttcgtttcagcggttggagcactcggtgtgttaatttggtactggttaaaacgtaaaaaatatttggatcaatatctaattgaacaaactgtaccagaatcaacagtaagcaccgttcaattgtttaaagagttatttgcatatgcgattccttacgttgtaattgggttaacaattcctttatatcaacaaattgatacattgacatttaactcaattatgcaggcgattggtcaaggtgatatcgcagagcgagctctcggtattttcacaatgtggacgcataagttaattatgattcctgtatcacttgcaacagcgtttagtttaacgcttgtaccagcaattacaaaatcatttactgaaaaacaataccgctatttgaaattgcaaattacacaaacattccaggcgaatatgtttttaacattgccagcagttgtcggtatttcttcactggcatatccaatttatactgcgttttacgattcagatccactaggtggacaagtattaatgtggtatgcaccagttgcgttgttattcgctttatttacagtaacagcggcaatcctgcaaggtattaaccagcagaagcatgcgattattgcgcttataatgggcgttattttgaaatttgtatgtaacgtaatctttattcgttatttcggtacagtaggagcaattctagcaacagcagttggtttcttagcttctgtttggtacacaaatcaacaaattaaaaaatacgcacactattcattcggtgttgtatataaaagaacattccaaattgcagtactaacacttataatggtcgttgctgtaaaactatcacaatggcttctatccttcatgatttcgcctgatggccgtattggtgctcttataacagttgcaatttgtgcaggtattggcggtcttgtttacggattgttagcaattcgcacaggagtacttgaaagagtatttggcggagaagcattagataaaattcaacgtaaacttggtagtagatttaaaataaagttgaaatcaagaggggcgtaattacgtcccccttttctatgataaataaagaaggtgaaaaacgtgagattagataaattattagcaaatatgggatatggaagtagaaaagaagtaaagaaattattgaaagacggcgttgtgaaaattgatggaacgccagtaaaagatgcgaaagttcatgtaaatgtagaagagcaagaagttatgattcacggtgaagttgtggaatacaaagaatttgtttacttaatgatgcataaaccacaaggtgttatttcagcgacggaagatgataatcatgaaacagtaatagatttattagaattagaagatgcaatctttgatccgttcccagttggacgacttgatatcgatacggaaggtttcttattgataacaaatgatgggaagttatcacatcaattattatctccgaaaaagcatgtgccgaaaaaatattatgcacacgttgcaggagtagtaacagaagaggatgtaaaagagtttgctaaaggtgttattttagatgatggctatgaaacgaagccaggtgcacttacaatattgaaaagcgatgatatttctgaaattgagcttgtgattacggaagggaaattccatcaagtgaagcgtatgtttgaagcggtagggaaaaaagtagtctacctaaagagaacagagatgggtccgttagtattagatgaagaactagaacttggacaataccgagagctaacagatgaagaagtagaaatgttaaaaacatatcaagtagatactgaaaagtagtacctttataggcgcagaaaagacccctttctaattattagaaaggggtatgtatttatttacatacaattatttttcattatgaggtcattctcactttctttcctgttgttgtccacttaccgcggcaagggctatacacgagttcattaaactgcaacacatttagatcacgttgtatcgttcgcggtgtgatcccgaactcatctacaaggtctttcgtcgttaccgttccgttttcattgatgtacatataaattgatttaatgcgtgttagcatacgagtagttgtaggtttcaagagaaaaccactcctctactagtttttttgaccccattcaggaaagaaggtcgttactaccattgtactctacatgataaaattcatgctttaatctacttaaattttacagaaatttaacaaatattcatatagaaaaatattggtagttgacattgtatatatggtcagtcaactaacacataaaattctacgtaaaacgccaaattcctgcaaatttttttgaaaaaataaaagaaaaactaataagaaatatctgaaatattacaattgttcggtatttagttttcgtgtatggcataagagatttcggtttgttatgatgaaagaaacaatatagtgaaggatggatgcgtgatgtcagcaattaattggacagaagaagttgcgaaacgaaaagatgatttaattcgtgatacacaacaatttttacaaattaaaagtgtatgggaagaagaatcggcgaaagagggcgcaccattcggtgaaggtgtagaaaaagctttatctttcatgttacataaaggagaaactgaaggttttgcttctaaaaatttagaaggatatgcaggtcatcttgaaatgggacaaggagaagagttagtaggcattctttgtcacgttgatgttgtaccagaaggagatggctggacgactcctgcatatagtgcggatattcgcgatggaaagatttttgcacgtggtgcaattgacgataaaggcccaacgatggcagcatattatgcgatgaaaattgtgaaagaattaggcttacctctttccaaacgtgttcgtatgattataggaacagatgaggaaagtaattggaaatgtgtagatcactactttaaaaatgaagaaatgccaacaatcggttttgcaccagatgcagactttccaattattaatgcagaaaaaggaatttctgacatacaagttgtgcaaaatggtagtgaagagaaaaaaggtacatatgaacttgtttcatttgattcagggcgccgtttaaatatggttcctgattttgcagaagcggttattacaggagaagatgtaaatgcacttacagtagcatatgaagagtatttacaaactgctaaaaaaatagggaaatcgactatagaaggaaatgcagtgacgttgcaaatagaaggaatttcagcgcacggatctactcctgaaaaaggagaaaatgcaggtttattattagcaaacttcttaactacagtttcacttgatggaaaagcaactgcatttgcgacatttgcaacagaaacatttactggtgatatttttggtgaaaaagctactattgcttataaagatgaaattagcggtccgttaacagtgaatgtcggtcgcatttcttatacgaaagaaaacggtggtaacttagggctaaacgtacgttacccagttacaactaactttgaagaaacaattgtgaagttgaaagaatatgttggtacgcatggttttgaagtggctgactattctaattctcgcccacatcacgtcgataaagatcacgtattaatccgtacgttacaacgtgtgtatgaagaacaaacaggtgaaaaagcagaactattagcaatcggcggcggtacttatgctcgttcattaaaagctggtgtggcatttggcccgctattccctggaaaagaagaacttgcacatcaaaaagatgagtatatcgaaattgaagacttattaaaagcaacagcaatttacgcgcaagcaattcatgaattagcgaagtaatggatatataaataatgtccgctctctattttggagagcggcttctttttacctgaatgagataagaaagaaaagcaacaatagaaagaaggagaagatgtacatggaactgcattattttgtcgcaattacgttaccgaatcatataaaagaaatgctgtataactataaaaaggacatgcaagaggaattacaatttcgttcatgggtacataaagaagactatcatattaccctttcatttttagggagtgcaacggaggaacaattagagggaataaaaaatggattacaaacagttgcagaaacaaaagaactatcgttcacgttacaaggtttttcaacgtttggtagggaaaatcagccccgtattttttgggcgaaggtaagtgagaatcacgatttgtttcagttgcaaaagcaagtacatgccatttgtgaagaaaatggattttctctagaaatacgcccgtatcacctgcatattaccgttgctcgtaaatggataggagaagaaaagtttcgtttagaaagtataaaagaagtgcctgaaatatcatttcaagcagatacaattactttatacgaatcccacgtgaaagaaaccccgaagtataaatcgattgctgaaataaaattacaaaaatagaatgttgaaaacgttttttatgcaggtgaatatactatagagaagaatggagttactgtatagagtcttgttgataagaaaagccttatcatttgcagctcattttatctcgcctaattggtgaaggctaataataagtgaggatggaaaaattttctcgctcattaaagtttcactttattttaactttgagaatgatggtgatttttttatgttgaaagtaaaacgtccatttgatgcctatttagatgaaatgaataaaattacaattttgctcccacatgcgtatggaacaagtcggacatttcgtttgcaagaaggaagtaatgtgaaagatttaccgattgctcatactattgcgcttccagatgcaacgaagtatgagtgctttatagaagagccgctagatgtggggaagtattatacagtacgagatgaacggaatgaagaaactgatttacaaataggtgctgttattcgaacaaaaattttcgatgaaaagtattattacgaaggtacagatttaggtgctgtgtatcaaaaacaagaaacgacatttaaagtatgggccccaactgcaaggcttgcgaaagtaagaatttataagagtgataaagaatataccgatcatgaaatgtacaggggagaaaacggagtttggattcaaacattacaaggtgatttagacggagcacgctatacatttcttgtttgtattaatttaatatggaacgaagcggtggatccttacgcaaagtcagtgactgtaaatggaaagtatggcattgttatcgatttagaaaagacgactgtaacgaaacgagagcaattaccaccattacaagcaatgacagatgccatattgtatgaattgcatattcgtgatgctactattcatccgaacagtggagtgagtaaaaaagggacgtataaagggctaatggaagaaggaacaacaggacgaaatgggacattgacaggtttgtctcatataaaagatttaggcgttacgcatgttgaattattacctttatattgtttcggtggtgtagatgaggcgaatccttcgtccgcctataattggggatataatccattatattacaatgcaccaacaggattttatgctacaaacccctctgatccgtataacaggatagttgagtgcaaacaactaattgaaacatttcatgaacaaggtattagggtgattatagatgttgtatataatcatgtttatgaaagagagctatcatcatttgagaagcttgttccaggatattattttcgtcatggtgaagatggtatgccttctaatgggacgggagtcggaaatgatgtagcgtctgaacggaaaatgatgaggaaattcattgtagagtctattttatattggcttactgaatacaatgtcgatggattccgattcgacttaatgggaattttagatgttgatacaatgaatatgatagagaaagaagtgcgaaacataaaacgagatgctttgttattaggagaaggatgggatttacaaacaccgcttcctcttgaggaaaaagcaacgttaaataatgcgaagaaaatgccacatatcgcgcagtttaatgatcaatttcgtgatgggataaaagggagtacatttcatataaataagcgtggttttgcatttggtgggcatgtagactgtaatcatttgcagtatattgcagcaggaagtcttttaagtatgaaagaaacagggctgtttttagagccggcgcaaagcattaactatgtagaatgtcatgataatatgacgatgtgggataaactagtgcgcagtaatgaagaatcagaaacgattttgaaaaaacgtcacctattagcgagcgcaatggttattctttcacaaggcattcctttcttacacgcagggcaagagttttatcgtacgaagaaaggaaatgaaaatagttataatgcaaatgatgagatcaatcaattagattgggatcaaaaagagaaagagatagagaccgttaactatataaaaggtttaattgcgattcgtaaagagcatggggcattccgattacaaaatgcagaccttataaaaaaacatatgacttttttacaaacatctacagaagtacttgcatatcacctagagcatgcagaatcgtttgggccgtggaaagagattatcgtcttatttaatagcggtttagaagctaaaactgtgcaacttccgaaagaagcaacgtggcatgtgttagtaaacgaaaacgaagcgaaaatagagccaatttcttcatttagaggaaaggaacttaggctcgctccaattagcacgtatatattgacgataatgtgacaaatcgctacttgacgatgagaatgtaataaatgtagaattgacaaaggtgacgattttgataagttgtcattctatgacaggttttgtaaaataaaatagaggatttttggcttaggctaatttttcttttcatttacagtaaaatatatgaatccacaacatgtgtagaaatgttgcggtttttcttttcataactataaaagataaggatttgttaacgggtaatgaatatggaatggttggaacaattattaggaaaagagtggagtcttgtaccggctggtggagtaacgggcgatgcatatattgcgcaaaacggacaacagaagttatttttaaagcggaatacatcgccctttttagcggtattgtcagcagaaggaattgttccaaaattactttggacaagaagggtaacgaatggtgatgtaatttctgctcaaaaatggcttccgggacagaagctagagccagaggatatgaaactagaacgtgttgcgaaacttttaaagaaaatacactcctctaaagcgcttgtacagatgattcaaagacttgggaagcagccgcttcacgcacaagagttattacaacaactgcaactcgttttaagaggagatataagggatgatgaaacaattcagcaaggccttcaatatttaatggattcattaaaagctattgaatacaatgaattcgttgtatgccattgtgatgtaaaccataacaactggctattgtcggatgaagatgaattgtttttaattgattgggatggagctgtaattgctgacccagctctagacctcggtatgttattatattggtacattccgcgccaggagtggagtgagtggctcggttattatgatattgaaatggatgaatcgctgcttaggcgtatgagatggtatgtgatagcacaaacgattttgtctattcaatggcatacaacaaaaaaacagcaagcagaagctgaatattggcatcaatatttacagcaactacttgcttcagaataatacttaagaaaaattgtccattccagcaatccactgagtaagttgttcttgattattggaaatatggttgtccaaattagaggaagatttacccgattgactataagaatatacatcgtttagcattgttttagcgtcactacttatattatcgtttgcgagtaacgattgaatgaggcgctctaattgctcgcattctgaaactgtcccgcagcaatcactttggtggttgactaaaatatctttcagcacttctaattgatgttgttgattaattggcatgaacggatcatcctttcgattgtttttctcttcaaatgtaagagaaaaagctgtttcgtcatggaatgtttaatgctgtatgtagtttttatcaaaatggtacatcttatacttgaaagaaacggaccgagtgctcgtacgtacttggttttttgtttggtagattgattaaaaaagaaagaaggaattattcctttaaaatagctatgtaaagagagggaaacatctatgcgtttaagacataaaccgtatgcaatggatcgaattaatgaatattcacatatcgtaatcggaaacccagaggagcgcgctggtagctggaaagaagtatttggaaacgaacaaccaattcacattgaagtaggtacaggtcgtggccgcttcatgtatgatatggcaaaagcgaatccacatattaattatattggaattgaaaaattcacaagtgttgttgtagatgcacttgataaattaattgaagaagaattaccaaacttaaagttaattaataaagatgctgaagatttaacagttttctttgcgaaaggtgaaattgatcgcgtttatttaaacttctcagatccatggccaaagaaacgtcatacgaagcgtcgtttaacgtataaaacatttttacgtaattacgaagaagtgttagtagaaggcggagaaattcatttcaaaacagataaccaaggtctatttgaatattctcttatgagtatggctgagtatggtatgttactaacgtacttaagcttagatcttcataacagcgactttgaaggtaacatcatgactgaatacgaagagaaattctctagtaaaggtcatcgtatttaccgagttgaagcaaaatatcgtacagagcctatgcagtaatgcataggtttttttacatctaaaataatcagaattttatgttaagattaattgaaagggggatgtgtaatggaacagttacaaattggagatataaaagtaacgtggttaaaaggcgggaatacacatttagacgggggagcgatgtttggtgttgtgccgaaagtactttggtcacgtaagtataaacataatgatacaaatcatatttatttacgaacagatccgttacttttgcaaacgaaagacggaaatatgctcattgattccggaataggaaacggtaaattgaatgagaagatgaagcggaatcaaggtgtaacagaagaatcatcggtttatgaatcattagaaaaactaggattaaagccagaagatattcactatgttttaatgacgcaccttcattttgatcatgcatctggtttaacaaaatgggaaggtgatcaccttgtaccagcgtttccgaacgcgaaagtttacgtaagtgaaacagagtggaatgaaatgaggaacccaaatattagatcccgtaatacatattggaaggaaaattgggagccgattgtagatcaagttgttacgttccagcaagaaatagaaattacagatgaaataaaaatggtgcatacaggtggtcatagtgatggacatgcagttattgctttagaaagccatggggaaacgatgcttcatttagcagacctattaccgacgcacgcacatcaaaatgtattatgggtaatggcatacgacgattatccgatgacctcgattgaaaataaacaaaagtggatgaagtatggtgctgaaaaagaggcatggtttacgttttaccatgacgcatattatcgcgctgtgaagtggaatgaggaagggcatatcgtagaaaaagtagaacggaaaacgagtatagaagcataaaaataggaggttgttccatcatatttattggagcagcctcttttttattgtcgggttttgtcggtaagtcgatatatttaaacaaacgctgatataaattgagttgcgccgatataattgggaaatcgctgatataaattgagttgcgccgatatattcggaaaatcgctgatataattttaatcaatacccgcaatttcaaaaaaataagaggttcacctaatgggaaccctcctttttatgctgctataacctctaaaacagtacctgttttagcatcaactaaaaattcaaatcgttcttgtatatcatttaacattgttgtaagaccgccgcgataaacttcatatgcgacatcatatttttcaaatgtctctggaaccatatgtacccaagagccagtaatttcacctttatgacttaatgcttgtttcaccattttcaatgctttttctgaagaaatatgggattgttcttgtactttgtttgcaacgagataaccagctgcgaacccaacgccaagacctgctactaaacctttccagctcatatattcacctcaattctataaaataaaaatagtgtaccgataataattataaagcaaatacagctaaaaaagaagaaactagaaacatttcgaaaatttcgttacaataaaagaggtattctactaaggtttgaaagaaggggacttcgtgaataaagagacattacaattatttcgtacgttaacagaattacaaggtgcatcaggttttgaacatgatgtacgccgttttatgaaacaagaattaagcaaatatgcggatgaaattgtacaagacggtttaggtagcgtatttggtctgaaaaaaggggacgaaactggtccgcgtgttcttgtagcaggtcatatggatgaagtaggtttcatgattacgcaaattacgaaaaacggaatgcttcgttttcaaacgttaggcggatggtggagtcaagttttattagcacagcgtgtacaagttatgacgaagaatggtcctgttattggggttgttggttctattcctcctcatttattaagtgacgcgcaacgtgcaaaaccgatggatataaaaaatatgttaattgatataggtgcagatagttatgaagacgcgattgaaattggtgtaaaaccaggacaacaaatcgtgccgatttgcccattcacgccgatggcaaacgaaaagaaaattatggcgaaagcttgggacaaccgttacggatgtggtcttgcaatcgaattgttaaaagaattaaaagatgaaacattaccaaatacattatattctggtgctactgtacaagaagaagtaggcctccgcggagcgcaaacagctgcaaatatgattcaaccagacattttctatgcgcttgatgcaagtccagcaaacgatgcatctggtgacaaaacacagttcggtcaattaggaaaaggtgctcttcttcgtatctacgatcgcacgatggtaacacatagaggaatacgcgaatttattttagatacagcagaaacaaacaacattccgtaccaatactttatttcacaaggtggtacagatgcgggccgtgtacatacaagtaactctggtatcccatcagcagtaattggtgtttgtgcacgctacgttcatacacatgcttcaattttacatgttgatgattatgcagcggcgaaagaattaattacgaagcttgtaagaacaacagataaaacgacgttagagacaattaagaataacgcgtagagaagaagggcgaaaaacccttctttttttaggttgaatagatgacccagcgatgagtggtggcggttagtgcctaatgggtgctcgaatgatgtattaagaccgcgggtaggaagaaagaagaagcctgtttttgtgtttaggaccagtaatattttagaaagcgaccttcttttatggggagaaggaattccctgatggtgtgtggtagtggttggtacttaatttgtgccgaagcggatattagaatagaatgatgaatttttatagaggtgaacgaaatgaaagtagtagttggatcgaagaataaaacgaaggttggcgctgtggagaaggtttggaaagatgctgaaattacatctctttctgttccgtcaggagtatcagctcagcctttctcagatgaagagacgatgcaaggagcgatcaatagagcgaagcgagcgctagaggacggagaagctccaattgggattgggctagaaggcggcgtaatgaaaacggagcacggtttatttatgtgtaactggggcgcgctagcaacaagtgatgggaaagtatttgtggccggaggagcgcgtattacgttaccagacgattttttagcacctcttgaagatggtaaggaattaagcgaagtgatggaagagtttgtgcagcgaaaagatattcgtagtcacgaaggtgcgatcggtatttttacagatgattatgtcgaccgtacggaattatttgtacacgttgttaagttgttagttgggcaatataagtatgacaaaaagcaagcataaaccttgcaccgtgcgcgatgtatggtagtataaaagaaagattataacatgaaaaatgtacccgttagaggaggaaatatagatgaagtcattagaaagcatggagcaattccaacagttaaaaaatgaagagaatgtagtctttatgttctcagcagaatggtgcccagactgccgctttgtagacccatttatgccagaagtagaagagaaatatagtgatttctcattttactatgtagatcgcgatgagtttattgatctatgcgtaaaattagacgtatttggcattccgagctttgtagcgtacaataaaggtgaagaaactggtcgctatgtaaacaaagatcgtaaaacacaagaacaaatcgaagagttcattgaaggtttaaaataaggcaatttgccaattgaattgtaaaacaacctctaccttcgcgggggaggttatttttttggaagggaggaaaaagagatgaagatgacaagtaaaaagatgaaagatgagctaataaagaaattatctcgcccagaatgggactttcagtatgatagtgagaaagaagttttacgtattgaacaaaaagactccaaaaaaggtattaacgtatcgcttccaggagttgtggcaaaatgggaagtgaacaaagaaaaggcaattgaagaagttgcttattacgtacaagaagcgctaattgcgatgcataaagaagaaaatagcggagcgaaaattttacctgttattcgctctacttctttcccgaaacaagcagaagaaggaaatccgtttattatgacggatcatacggcggaaacacgtatttactatgcgttagattcgaataaaacgtatcgactaattgacgagcgtctattacaaaaattagaacttacagaacagcaagtgcgtgaaatggcattattcaacgcacgctcattaggttatgaatttaaacaagacacagtagcgggtaatacattctactttttaaacacaaatgatgggtatgacgcgactcgtattttaaacgaatcgttactacaatcgatgcgtgaaaagatttctggtgacatggttgttgctgttcctcaccaagatgtattaattattgctgatatcgtcaacgaaatcggttatgatattattgcacaaatgacaatgaaattttttgccgaagggcatgttccgattacatcactttcattcgtatatgaagatggagaatttgaaccaatctttattttagcgaaaaatcggaagaagacagatggaaaagagaaaggatgaacgaagtgaacgttttttacaaccttgaaggaattggtgacactttaattgttgccttacaagatattactttagagaaccgtacttttgatcgcaaaggagatgttgcacgcgtatacgatcgtgaaagcaacgagacagcaggattcaacatctttaatgcatcttcttacttagaagtaaaagaaacaggcaaccttacattaacgaaagagcttgtagagaaaatcaacgaaattttagcgaagaatggctttgaagaaacagtagaagcagatctttctccgaaatttgttgtaggctatgtagctgaaaaagaaaaacatccaaatgctgataagttaaacatctgtaaagtagaaatcggtacagaaacattacaaatcgtatgtggtgcaccaaacgttgatgcaggacaaaaagttgtcgttgcaaaaatcggcgctgtaatgccaagcggtatgttaatcaagccagctgagcttcgcggtgttccttcttctggaatgatctgctctgcacgtgaattagagcttccagatgctccacaagaaaaaggtattcttgtattagaagatagctttgaagttggacaagagtttaaattttaattgatataagaaaagagaggttgtccttttggacagcctctctttttttgtcattctttgtcggtaaatcgaaatttcgtgttaaatcgttgatatattgagagttgtgatagatatatttaaaaaatcgttaatatgataaggatgtcactttttttcttaaaatctatattgtattttataaacaatctagttaaaatttagaaaagtagaaggggatagaagtatgaaacagcaaccaaaaatcgcagaacttctaaaacgaattgaaacttcaaaacagcaagatgttgagctaggtacttatgaaatatatttgtttagtgaaagtgaattagaaaaaggacaaatcggttaccgatacgataaacataaaaattcattaataagtgaagaacacggaaaatggaaagaagaatggattacaattggatatgaaacggatatgggcgatccagttttcgtaaatatagatgatgccgcttatccgctttatactgcagaacgtggtacagaaaaatggcaaccagtttatattggaaatatagatgagattatagggcaattataagaaaaactttgaatccggtgcaaagtgatgggagagaagtatgaagtatataaaaataatgagcatgattgcattcattggaatatatatggccggttgttcacaagggcagccgaaaaaagaaactacatcttctatacaagagaaaaacaaagataccaaagaagacgcaccggtagaaaagcaacaagaaaagaacgaagaatcgcaagcaattcaaacgaatgagcaagtagaacataagcaagaggaagtatcatctgatgaaaagaaagaagaaactacgccagtgcagccgactgagcaaccagtgcaaaataatgaacaaaaagtagagagtaatgaaaaacaagagaagtttctcgtcgttattgatccagggcatcaacaaaaagcgaatttaaatttagagccgattggaccaggggcaacaacgcaaaaatataaagtgacagacggtacaacaggtgttgtgacgaaaaagagagaggctgtacttgtattagaaatggcttttttattaaaagaaaagcttgaagcaaaagggatacaagtattaatgacgagaacatcacaagacgttgatataagtaataaagaaagggcgacattcgcaaataatcataaggctaatttatttttacgtcttcatgcagatggttctgaaaatccaaaccaaagtggattcgctgtattgacgccggcagaaggaagtccgtatacgaaagagatttatgcggaaagtcttcaaatctctcaaacgattgtaaataaaatgagagagaatcaacaagtgaaagtgaatggaattaaattcagggatgatctttctggatttaattggtccaaagtacctggtgtactattagaacttgggtttatgtcaaatcctgaagaagataaaaaattatctgactcgcagtatgtaaattccttgttgcaaagtgtaacggatagtgtagatgaatatcggaagagtaaagcttaaacgcagtcttacatgaaagactgcgtttttttatatgaaaacactcgtaaattagaatattatggataaatatgacatgcttaattttacctgcactttttgccgaatgctgatacaataaaggatgttactatttagtagaaagagtggtaagcatgttagattggatgaaaaagctgtttaacaaagaggaagaacaaacagcgatgaataaagaagtaccaaagcaaattgaaagtcagccgaaaattcctcgtgtaaaccactacactgaagcaagagaagcacaaatggcaagtaggaatgcaggtaaatgccgttttcctttagtaccggataatgggttcgatgaagaggatgaaagcgaagtaaatcgcttcgaagaacaacctgttcaaggagtaacatatgaagaaccgactgcccaaagaggaataaaggtggaaagaagcagacgaccgtatgtggaaaaggtagtttctacatatgaagagccggaagtgcaatatgaaccggtgcgggagtctgtcgtaaagaaagcatctacaccagcgcaagagagtaaccgtagaccatttcggccaacagaaatgatttcgccaatttatggatataatcgtccttcagtagagaaaaaggaagaaaagcaggaggaagtaaaggaaagagaagaccttgaaatatctgtagagggtaaatcagtcgttgatgcatggttagagaaaaaaggatatacattatctgatttctcagaaggacaagcaccaacttcttctagtcatagagctgctaaccagcaaggagagcaacaatataaagagaataaaaaggaagaaaagtcagtagttgatcaatggctagagaaaaacggttatgaaattgaacgccaagtgcctttagtagaagaaaaagaagtgattcaagaaatgagtacaccgcaggaagtttcagcggatgaattacttcataaaacagtagctgagcagatggaaagtgctaagctagaaaaagatgtagtggtgttaaacgaaaacaatctacaagaagaattagtagcttctaaagtagagcacgaggatacaatattatcagaagaaattaaacgtaatacagaaataaaacaacctactattgaagtagaaaagcaagctccagaagaatcagtgattgtcaaagcagaagaaaaacttgaagaaacaatcattgtggaaataccagaagaagtgtcaaaagtagaagtaattgcagaaacggaagagtttgaagaagtagttatggaaacagaggcacctgaagaagtggaagtaattacagaaacagaagagtcagaagaagctgaagtaattgcggaagcagaagagtcagaagaagtagaagtaattacagaaacagaagagctagaagaagtagaagtaattgcggaaacagaagagctagaagaagtggaagtaattacagaaacagaagagtcagaagaagctgaagtaattgcggaagtagaagagtcagaagaagtggaagtaattgcggaagcagaagagtcagaagaagctgaagtaattgcagaaataaacgcgcctgtagtagagacatttgtagcacttgaggaaattcagcaagaagatgaagcaattgaacaaaagagtgaattcatacatgttgctgaggctgatgaacaaacgaagaaagatgttcaaagctttgcggatgttttaattgcagaagaacaaccagttgtagaagaagcgccagtcgtagaaaaacaaccagttgccgaggaaacactagtcgcagaagagcaacgagttgtagaagaagcgccagtcgcagaagagcaacaagttgtagaagaagcaccggtcgtagaagagcaatcagttgtagaagaagcgccagtcgtagaagaacaaccagttgccgaggaaacaccagtcgcagaagaacaaccagttgtacaaaaagaagaaccaaaacgtgagaaaaagcgtcatgtaccatttaatgttgttatgttgaaacaagatagaacacgattaatggaaagacatgcagctagagcaaatgcaatgcagccttctgctaatgtacgagtagagaataagccagtgcaacaagaggtagcagaaccacaagtggaagaacgcccagtgcagcaagtagcagcagaaccacaaatggaagagcacccagtgcagcaagtagtagcaaaaccacaagtggaagagcaaacaatgaagcaagtagtagcagagccacaagtggaagaacgcccagtgcagcaagtagtagcagaaccacaagtggaagagcacccagtgcagcaagtagtagcagagccacaagtggaagaacaaccaatacagcaagtagtggtagagcaagtacaaaagccaatttcaagtacggaagtacaagagaaagcatatgttgtaaatcaaagagagaacgatatgcgaaatgtattgcacacaccaccgacatacactgttccgccattagcgctgttgtcgattccacagcaatcagcgttagataatactgaatggttagaggagcagaaagaattattagatacaacgtttaataattttcacgttggagcacatgttattaatgtatcgcaaggtccggcagtcactcgttttgaggtgcagccagacccaggtgtgaaagtaaataaaattacaaatttaagtgatgatattaagttaagcttagctgcgaaagatattcgtattgaagcaccgattccagggaagagtgcgattggaattgaagttccaaataaagaaagtaagccagtatttcttcgtgaaattttaagaagtcctgtattcacaaagagtgaatcaccgcttactgttgcgctggggcttgatatttcaggggatccaattgtaacggatattcgaaaaatgccgcacggacttattgcgggggcgacgggttcaggtaaaagtgtgtgtattaacgcgattttaacgagtattttatataaagcgaaaccacatgaagtgaagttaatgttaatcgatccgaagatggttgagcttgcaccatacaattctgttccacatcttgtagcacctgttattacggatgtaaaagcagcgacagctgcattaaaatgggcagttgaggaaatggaacgccgttatgaattgtttgcgcatgctggtgctcgtgatttaactcgctacaatacgattgtaagtgagcgagaaattccaggagagacattaccttatatcgttattgtcattgacgagttagccgatttaatgatggtagcacctggtgatgttgaggaagcgatttgtcgtattgcgcaaaaagcacgtgcttgtggtattcatttattagtagcaacgcagcgtccatctgtagatgttattacaggtttaattaagtcaaatattccaacgcgtattgcgtttactgtatcatctcaagttgattcgcgtacgattattgatattgggggcgcggagaaattacttggccgtggtgatatgttattcttagggaacggtacatctaagccagttcgtgtacaaggtgtatatgtatcggatgatgagattgaaaaaacagttgatcatgtgaaaaagcaaatgaagccgaattatttatttaagcaagaggatttattagcgaaaacagaacaagctgagtcggaagacgaattgttccttgatgcatgtcaatttgttgtagaacaagggggagcgtccacatcttctgtacagcgaaaattccgcatcggttataatcgcgcggcacgtctcattgaagagatggaatcgcaaggaattatttctgaaggtagaggaacgaaaccgagagatgtccttatttctgaggacgaatttgccgctatgcaggaaacgaatgtatagtaaacggttttgctgtatactaagagaaaatgttggatagtaaagtagggagtaaagcgacatgaaagaaattgaattaaaattaaaaggtgaaataaatagactaacaaataaaacatttaaatttgacgaacgtgttggagaagggtggttctctgccgtttactttttaaagactagagaaatcatcgaagaatttcgcccgaaaagtgttgtaacgatgcaatttttccaaaaggaaaatgcagttctttgcggaacggatgaagtaattgcattgctacaaacattcgctaaaaatcctgaggaacttgagattaattctttaaaagatggcgataaaattagtccatttgaaacagtgttaacaattcatggtccttatgaaaatttcggatttttagaaggtgtcattgatgggattttagctcgtcgtacatcggttgcgacaaacgtatataacgttgtccaagctgcgcgtagcgtagataaagaaaaaccagttattttcatgggagatcgtgacgatcattatacacaacaagctggtgacggttatgcagcatacatcggaggtatgagcgcacaagcgacgcatgcgatgaatgaatggtggggcaaaagtggtatggggacgatgcctcacgcattaattcaaatgtttaatggtgatgttgtggaagcggcaaaagcatatcataagaaattcccagaagatgaattagttgtattaattgattacaacaatgatgtcattacagatgcacttcgcgtagcgcgtgaatttggatcaacattaaaaggtgtacgtgtagatacgtcccgcacgatgattgatcaatacttcattcgccacccagaagtacttggaacattcgatccacgtggtgtaaacccatcgcttgtattcgcacttcgtaaagcacttgatgaagaaggattccagcatgtagacatcgttgtaactggtggatttgatgagaagcgtattcgtgaatttgaagctcaaaacgtacctgttgacatatacggggtaggaagtagcttattaaaaatgaatattggctttactggtgataatgtagaattaaatgggaaaccagaagcaaaagctggtcgtaaatatcgtccaaacccacgtttagagcgtgttcaattagaaaaaagagaagagatgtaaaagagagaaaaactgataggtgattgaccctatcagtttttctgttatcatagtatagcggcttcttttttgctataatggacttgttatggacatataaagaagtacgtacgagtttatcctgataagtgaagggaaaaaataacttcactacatcaaaaatgtatgatgattaccaaaataagaaaagattcatatactgtcttatagataggccgttgtattagttcgaaatgttggaggttctttaagatgacagtttaccattttgtaggaattaaaggaacaggaatgagttcattagcgcaaattcttcatgatatgaagcatactgttcaagggtctgattatgaaaagcgtttctttacacaaacagcgttggaaaagcgtagtatctcgatccttccttttgataagaataatgtagaagaaggacaagtgattattgcaggaaatgcatttcctgatacgcatgaagaaatcgtagcagcaaaagaattaaacatcccagtccatcgttaccatcatttcttaggtgacctgatgagccaatacacaagtgttgctgtaactggtgcacacggaaaaacatcaacaacaggtttgttagcccatgtaatgcaaggtgcacacccgacatcttaccttattggagatggaacagggcatggggtagaaaatagtaagtattttgtatttgaagcttgtgagtatcgtcgtcatttcttgtcttataatccagactatgcaattatgacgaatattgattttgatcatccagattattttgcagacatcaatgatgtattcagtgcattccaagagatggcattgcaagtgaaaaaaggcattattgcatgtggagatgatgaagaacttcaaaaaattcaagcgaaagtacctgttattttctatggatttggagaagataatgatttccaagcacgcaacatccaaaagagaacagatggcacgatattcgatgtattcgttcgtaacacgtactatgatacgttcaaaattacaggatacggcaatcacagcgtattaaatgcgttagcagtaatcgcgctttgccattatgaaaatgttgatgtagaagcagtaaaacatcaattaacaacttttgaaggcgtaaaacgtcgctttaatgaaaagccgatgggagagcaagtaatcatcgatgactacgcacaccatccgacagagattaatgcaacgattgaagctgctcgtcaaaaacatccagagcgtgaaattgtcgctgtattccagccacacacattctcacgtacagaaaagttcttagatgagttcgcagaaagcctaagcaaagctgatcaagtatacttatgtgatattttcggatcagcgcgcgaaaataaaggtgaattaacaatcgaagatctgcaaaagcgtattgacggtgcagagctaattacagatacaacaacggatgtattaaagaaacataaaaacggcgttctaattttcatgggcgcaggtgacatccaaaaattcgaagcagcttacgtaaaagaagttcaagttgcagagaagtaatagaaaagacgcatagcttagctgtgcgtcttttttatgttgtcgtggttatgcattaatgttgaaacgtctatatatatggagttgtgttcgatatatttcaaaaatcgttgatatattggtacgcgttttgaaatataagtgttagaataataagaaaactaaaaaggggactaaaaaacatgttcacactccgagtagatgacgaaatcgaactacaattactagaaaaacatcataaagaggaattatatcaattattagatcaaaaccgtaatcatttacgaaaatggctcccttgggtagatgggacgaaatctgctgatgcttatgatgagatttttccgatgtggttaaagaaatttgcagagggagatggttttgaaagtggcatacgttacaaaggaaagctcgttgggatggtaggtattcatccagtgagctgggggaagaaagcgacgagtcttgggtattatcttgcagaagatgctggcgggaaaggtattatgacgcgtagtgtgaaggctgtacttcactatgcatttgagaatttaaaattaaataaaatggaaattagatgcggtgttgaaaatgtgaaaagccgcgctattccagaacgtttaggatttaagttagatggcattttaagagatgatgaatggctatatgatcattttcacgatatcgctgtatatagtttactagcttcagagtggaaggagattcgatgaacgagaagatacgcattattccgtatgaaagtacgtttcaagaggaagtagtagatcttatcgttcatattcagcaaaaagagtataatgtttcaattacgaaagaagagcaacctgatttacttgaaatagaaacattctatcaaaaggattacggaaacttttggatagcaatttatgatggtaaagtagttggaacagtagctttattagatattgagaatcatcaagtagcgttaagaaaaatgttcgtgaagaaagagtttcgcggaaaagaatggggcgcatcacatatgttgcttcaaacagcaatttcatgggctgaggataaaaaattgaaagatatttacttaggaacaacagtaaaatttttagcggcacatcgtttttatgaaaagaatggttttgaaagtgtgagtatagacgagttgccgaaaaactttccggtgctacaggtagataagaaattttataggtacattgtgaaaaaggtcatttagaaatggcctttttctatgaagcaaaatggaaatagtggtataatttgggttagggggtgtaggtatgaactttccaattcaaagaagtaagtcagtagtcattttcgtttgtcttacgttagcgtttatgtttatatatccaattgtcatgcttttcaccaataaagcgcattggatgtcagcgttgattgggatgggtttatgcttcattgtaaatgtaccactcgtttgggaagtatttattaaaaaacataaagtagaaaatggcgtattaaagtacggtattttaaatgatgatattgtattaaaagatgtgagaattatacgtcaggtcggaaagtctcttgaaattacgacgaatgcatataaagtacatatggttgcgatgccgcaaaatatggatgaattcttggggcttatagagaaagaaaatccacatgtgaaaatagaaatggtaggaaagaaataaaaacgctcggcgaaaattccgagcgtttttattattattttaagttctctgggtttaaagcttctagttcaggtacaacgaagcgtccgtctttacggattagtacgtcgtcgaagtaaatttcgccgccgccgtattcagggcgttggatgcatactaaatcccagtggatgttcgagttgttgccgttccatgcatcgtcgtaagcttgtccaggagtgaagtggaagctgccatcgattttttcatcgaataggatgtctcccattggatgtaagatgtatgggtttacgccaattgcgaactcaccaacgtagcgtgcgccttcgtctgtatcgaagattttgttaatgcgctctgtatcgtttgcagttgcttcaacgatttgaccgttctcaaacttaagttgtacattttcaaatgtataaccgttgtaaggagatggtgtgttgtaagaaactgtaccgttaacagaatcacgaactggtgcagagtatacttcaccgtctggaatgtttaaatgacctgagcatttaattgctggaatgtctttaatagagaatgttaagtcagttccaggaccagttaaacgaactttatctgttttattcattaatgtaacaaggctatccattgccttatccattttaccgtagtctaagttacatacttcgaagtagaagtcttcgaaagcttctgtactcattttagcaagctgtgccatagaagcatttgggtagcgaagaacaacccagcgtgtttttggaacgcgaatgtctctatgaacttttttaccaactgtttggccatgaactttcatacgctcacttggaacgtcagcttgttcattaatattatcaccagagcgaaggccgatataagcgtccatgtctttcattacgcttgcttcatatgcagcgatttgttcgaaatgttcttcagtagcacccattaataaagagcgatctacttgatgatcttttaaagagacgaatgggaaaccaccagctgcatatgcttcttttacaagtgcagttacaagttctttttgtaagccaaagttttcaattaatactttttcacctttttgtaagcggatagagtagttaattaaattgtatgctaacttttcaatacgtggatctttcatatgtaaagcctccctactaattatgtatcctctcctattgtaacctacttagtggaatttgttgaatgatttatgttacagttaacgaataagtatgaaaattctaatgatgagatagggattagaatgaaacggaaaatgattgtataataggggaaagtatgaaaaagataaaggaagtgatgaaatgcaagttcttttatatgtaagtgcggctattatcgcggttgctttcgcagtattagtagtgtatgtatgcagaacgttgttatcggttcagaagacgttggaaaacgttgcaagcacgttagaaggtttagaaaagcaaatgcaaggaattagcgtagagacagagcaattattacataaaacgaatgcgttagctgatgatattcaacagaagtcacagtcattaaataaagtggtagcgggtgtagatgggattggaacgacaatccaatctttaaatacgaagcttcgtaatgtatcggactctgtaacggacgaaattgaaaataacgctgataaagtagcgcaagttgtacagtggagcagtgcggcgattgaagtatacaatcattaccgtgcgtcgagacaagagaagaaggttgaaaaagaagagcgtaaattagaaagaattgagaaaaaagctgaaaagaaagagaagcgctctagatttcgtatgagaggtgaatcgtgatgaatatgacaaaacttgaaacaattgaagagcttgaagtcttagtagaaaagaacgagccgtatgttctttttaaacatagtacgacatgcccgattagtcacggtgcatacacagaatttcaagcgtattgcagcgaagaaagagaagtgccagcgtattacttatacgtacaagatgcgagagatgtgtcaaatcgtgttgcagaacaatacagtattagacatgaatcaccgcaagtgctatacataaaagatgggatggtagtatggaatacatctcattggaatattaaaaaagatgctttagaagagaatataaagtaaaaagaagcaagctaaaggtgcttgcttcttttttttgtttttgttgaaatatatttagtggtacactattaatagttcaaactaaataactagattgttgaaagtaggttttaagtaatgaagaaaatggcattatccttcgcagtcgtaagtttattactgggagcttgtagtaacaatagtaatacgattagtaagaaggatgaagttatacaaaaagatacaaaagaaaaaagtatgattccgagaactgctgtttctaaagattattatagaactgttattcctttaaaagaacaaaaggttattaatacagctaatataaaaacaaattctaaattagatttagcagagtatgaaaatggtttaataaatattgcaacgcagcaatttgatacagagagtcacgtactgcaattaaaccagtatattccagagaaactaattgatgaactagttgcgaaagtagaagcgccagttttgacgaatattatagaacaagactatttcggaaaacagaattcaaatgaactaagtttatctggtgttatgattggcttagctatgtcttcaagtgtatcgaatgaagaagctatgtctaaagggtctgaagttgctaaacaacttattgaagctattaacaaaaatgataagtataacaaatctccaattacgtttgctatctttaagcaagaaagtactagttctttaaaaaatggtacgtatattgctagtgctactgttcaaaagaatgatacgaaccttggaaattggagtacaattgatgaaaagtcgtattcatatccttctgatgaatttacacaagcacatggagaagataatacaaaaataaataactttgctaaggaaataaaaggtttttctaatggagattttattccagtcaacgctaaagtttcttataagaaagatcaaatggatacattaaatatgaatattgttattaaatataacggtaaaacagaattaatggctcttacccaattggctgcgcaaggtatgttagacaaattgcctaaagatgcgaaagtacaattacagatcaagtccgaaagtaaaatcgaggctgtgattataaaagagaaaaacagtgataaaccgtttgtttccttcttgtaaaaaagacagtatgtaaactgtctttttttattttaaatgaaaatatacaacgttttttgatggtaattcattgctgtatatcgtgtgacaatcgtatatgtatcagctataataagttatcttaaaaaagtaacatataggaatttgaaagaggtggctttcttatggcatcacaacaattaggtcgtttacgttctgaaattgatcaacttaatttacaaatattagagttactaaacgaaagaggtcgtctcgtacaagaagttggtaatttaaaagaagtacaaggtgtgaaacgttttgatcctgtacgtgaaagaaatatgctggatttaattgcagagaataataatggtccatttgaaacttcgactttacaacatattttcaaacaaatttttcaagctggtttagaattacaagaagatgatcatcgtaaagcattacttgtttctcgtaagaaaaaaacagaagatacgattgttgaaattaaaggtgaaaaaattggtgacggaaatcagcattttattatgggaccgtgtgcagtggaaagttatgaacaagtacgtcaagttgctgaagcaatgaaagagcaaggtctgaaattaatgcgtggtggtgcgttcaaaccacgtacttcaccgtatgattttcaaggtcttgggttagagggattacaaattttgcgccaggtagcagatgaatatgatttggctgttattagtgaaattttaaatccgaatgatattgagatgtcattagattacgttgatgttattcaaattggtgctcgcaatatgcaaaactttgatttgctaagggcagctggtgctgtaaataaaccagtattattaaaacgtggtctatcagcaacgattgaagaattcattaatgcggcagaatatattatggcaaagggaaatgggaacattattttatgtgaacgaggtattcgcacgtatgaaagagcgacgcgtaatacgcttgatatttccgctgtgccgattttaaagaaagaaacacatttacctgtcgttgtcgatgtaacgcattctacagggcgacgtgaccttctcttaccaactgcaaaagcagcgatggcaattggtgcagatgcaattatggctgaagtacatccagatccagctgtagctttatcagatgcggcgcagcaaatgaatataccgcagttcaatgattttatgaatgaattaaaatcatttggaagtaaattataaaaacttttaatgagctgttccaaaaagggattttggaacagctttctcttattgtatagcgactgtcattgtcgatttttgttggtaagttgatatatttaaaaaatcgctgatataattagagttgcggtcgatatatttggaaaatcgctgatatatttcgagttacagtcgatatattcgaaaaatcgccgatataaatttcatttactatcgtactgcttaaaataagatttctacttaggaaacatctatttttttacaaaaaatgcccttttttcataaaaaatacgaaaatacgagaaaagaagcgaattttttcgaaacttttgcgggaaaatattgtatgagcctgcgtttttatcgtatcattagtaaaaggaagaactcgggacgattggtggcatctgcaaatagagttgatgtctttttttcattcaagtaaccgatacataaaaatagataacaaaaatagaaggagtgtgcgatgagatgaacgtaacaatctatgatgtagcgcgcgaagcaaacgtttcaatggctaccgtatctcgtgttgtgaacggtaacccaaatgtaaagcctacaacaagaaagaaagtattagaagcaattgatcgtttaggataccgcccgaatgcggtagcacgtggactagcaagtaagaagacaactacagtaggtgttattattcctgatatctcaaatacgttttatgcagaacttgcacgtggaattgaagatatcgcaacaatgtacaaatataacatcattttaagtaactctgatcaaaacaaagagaaagagttccatttattaaatacgatgcttggaaaacaagtggacggaattgttttcatgggtgaagatattacagacattcacattgaagaatttaaaaaatctccagtaccaattgtattagcagcgtcatttgatgagcaaaatgaaacgccatcagtaaatattgattatacacaagcagcttatgatgcaatgaagcactttatcgagcaaggacataaacgtatcggtttcgtctctggtcctttcattgataaagcgggaagtgcgaagaagttacaaggttataaaaaagctttagaagaagctggtatttcatatgatgaaaatcttgtaatcgatggagattacacatatgactcaggtatcgaagcattcgaaaagctttggagcaatgatgaaaagccaacagcaatcttcgtatcttctgatgaaatggcactaggtgtaatccatgcagcacaagacgctggattaaacgtaccaactgacgtagaagtacttggtttcgataacacacgtcttgcattaatggttcgtccgcagctttcaacagttgttcaaccgatgtatgatatcggtgcagtagcaatgcgtctattaacaaagtatatgaacaaagaaaaagtggaagatcacactgttatcttacctcaccgtatccaatttagagattcaacgaagtaagtataaaaaagctcacagcgattgctgtgagcttttattcgtattcaggatagtatttttgtacgactgcatttaccatttcgtctttcttaacgtgtaaaaatcttgcgtacagttcttttccggtttcaaatggtgtatcgtctaattcaaacacatgcaacacttttcggaacttccacgttatttgctcaccgtacatattatcgtacgtatcttcagattgcatagcaatttttttaccaagttcgtgagcatcttctaaattgtttgctttaacaagaataatactttcttcaaaaagtgtatcgtgattctcttcataatgctcatcaattttcgtaggatcaggctcactacaatgaacagattcaaacaataattttacagcgtacatattatgctgcatgtttcactttataaataatacttgcgacaagcgaagcaggtattgtaaatacgttactttgataatggtaatgtacttgggattcttcataagacatgttatcatatagttcgttttgtgagacactcaattttttctgtttttctttgagcattttaatgtagttgtactgtattgggacgagaatgatgaaataagctaatacgattagtgaaatccaaatcattatgaacactcccttacaaagaatatttctctataacaattatatcaataaaaagaaaaaataaccatttttagtggggctaattttcttctaaaaatgcgaacagttccttttggttttttaaattgcgatcaatacatgttcgagcaacatatttcaatccttgtaataatgcatctacgtgcaaagtatcataatgaattatatttccctctaccatcgtttcgtctttttgcaagttaattgatatttttagtacagttatattactttgtaaatttacaacttctatgtaaaaaaactgtttgtctaagtcaatcgtaacataatcgaatcgttcggatagctctaatttacatgtagtagtatagtccaaatgaaagcctccttattgtataagtgtatgttataatgccttcgctatagatggggctattccttgttatatgtcacataagtgcaaatttaactattatagggcaatgtcatgtataatagaaagaaaaggcttgtgaggggggaaaagagatgatcgttctttggataattacgctttgtatgactgctatttttgcatatatgacgttaaaacaaaatggtttaaagcgatttgttccaggaagtattcttgcaggaattgcccttatcacgtatgtaatttctatttttattgaaagtgtatcagtagatatgagcacaagtttaatgtttattggtattacactatttgcaggtagcattatggtacttatggttgctggtattattttatttattcatatgaattcggaaacgttatagcatatagaaaaggcatgtcccgagggacatgcctttttatccgttcaattatgctctatctttagaagagttttgctgttttagtaagtcgcgaatttcgccaagaagaacttcttcttttgttggttctggaatttcttcctctttttcttcttcttcttttttagatgttagtttgttgaaaactttaacaaacataaagatagaagctgcgataattaagaagtcaaaaattgtttggatgaagttaccatacataacagcagatttaccgtatccaaagtgtaaatctgtaaagtcaacgccacctaataccataccaagtaatggtgtgatgatatcttttactaaagaactaacgattttaccgaatgcagcaccgattacaaccccgacagctaaatcaacgacattccctttgaaagcgaattttttaaactcgttccacatgtgttaatcccatcctttccacgattcattatgaaatttataattcctatcaacatattctatagaaatttacgagagaaataaagagggaatgggaatgaaagtaaattctgaaaaatgtatctgttttaatttttgtttacatcatctagtaaagattgtagcatttgctgtgtttttaatccttctaatccatctacaacgggctttgtatcgccttgtacacactcaataaaatgatgaacagcatcttcaaaaccacgttgttttaacgtcgtatcccatgatggggaaccactttgtgaaactgagttttcctgttcaatttcaaatgtattcatattttttacgcgaatgattttccctggcgttacaagttcaatttgttctaaattagtaccggcatggcgatgcattgcagtagaaagtaacagtccacttggagttgtatatgtatgatgtccgtaaagaagttcattcttttcattgatttgcatcatattgtgaacggcgttaaggtcatcattagctaaccagcgagcggtatctacaatgtgtaaataatcatctaacatagtgaagtcgtacgtatatggcccgactttatttgtacgatgcttttcaattcgaatccatgaaatatcattagcctgttctttggcagcgacatacataggaacgaatctgcgattaaatccgaccattaattttcggttatacttctcgctcaactcgactagttgctcagcttgttccactgtagctgctagcggtttatcaacataaacgtcgatccctttttttagaagttcagaaacgatttcataatgcgatgcagttgaactatgaacgaagattgcatcgcattccgaagctaacatttcaatagaatgaaagtcttgaattcggtattgctggcaaacttgttttcttttctctgcattaggtgtaaacgcccctacaaaattccaatcagtttcttttgtaagtgttggaagataggccttttgcgcaatacttccaagtccaatcattccgattttaggtatattcattttatctccgccttattattcaatatttatatgccggaataaatgtagcataggatagctgagaatggcaaaaatgaagaatctatattgagagattctttatatcatagtaagttcgctgtcgcttaataatttgtgtagcattttttcttgattttgtttagctgttttattccctgttttagcgtataaggaaattaaatggtgatacgtattttcttcaaatggattcatagattgcatacgcatgcaaatatcaattgcttcagtgtaactcgcgccttctatataaaaacgaataagggaaaaggcgtgttgaaaatataagttttgtaatcttgttctttctccttcgctccaccaatagtccatatcaataaggtaatctccagtatataaagagaggcatgcaatgtatttatctaatgtatcgctacatatttcttttggaagagcggctgctgcttgttcgaatagatcaacatcaatcaaaatgttttgtaaatcgagtttatatccgtcattcactcgagtaatgtttacattcatttcgtaagcatggatggttcttcgaatttgatatatggctgaatgtagatttactcttgcttgttctaaatcagtatttgaccagagtaattcaattaaagtatctctattaataactttatttcgattatgaactaaaaataaaaatagttctttcgctttttttgtgcgccatttttctagggggatttttttgtctttttcatgatctacataatataactcaccaaggcaattgagtatcgaagtttctattgtagaggaattagttgtttcaatcgtcatgctttgcataagacgttgaatagtgttatgcaatctttccctcgtaataggtttcataatgtaatccaatgcataaatttcaaatgcttcaaccgcataacggtcgtgtcctgtaatgaaaactatttttatatttttatgttttgattgtagttcgcgggctaacataacgccatttttttcaggtatctcaatatcaagaaatgcgacatcaattgtatgatctttactataaaaactaagagattcacaatcatcaaagcaaacgatatctttaaaaatttgaagttcttttaacatcttttcaagtctttggagtattaatggttcatcatcaacaataattgccctcatagttcattacctctttcttacaatcttgtttaatgatttaactcaagtcatatcaccaataaatatttagacaaaataggacatttttcattcctccataaataaccataaatattacatggtaattatttgtaattactattataaatgattcttattaattgttatatacgataaattatttaaatatttctattttttgattttttgttcagtttttgttcagtgtcccaatttatactttgagcgtaaaagtaatttagcgaaaaagggggaaatgaggcgagataaatttatgttaagtgagaggatggaacgatgaagaagaacgtcacattatttatgttgcttctactcgtatttcaagtgattagcccagggataatagcggttgctgctaatacggtggaagcggtgcagcataaggtaacaactaaatcgacagggaatatgtgtttaagggagcatgaaggggagctaatttttaagtggccagcaccaaaacaaaagaaagttgattttgttattgtgcaagatgcaagtggaagtttcaaaggcacaatgccaaatgtgaaaaaagcattgagcaatatcgtagatgaactaaatcctgcgacggatcggattatggtaacgagttatcaagattataagggatataaagctagtgacggtcgtgtacttgaaagtagaggtaatgggattaaaacaaccttgcaagcaggattaactaataactttacctcagcaaagaatggcatcaataaaataactccagatagcggtacaccaactgccagtggtcttcagtttgcgttagctgagtatgagaaagcgaagggacaaaatgatccagaccgagaaacagtttttctgcttgttacagatggtgttgctaacattcgaaaggatggctatatttacaaattaacaaatcaactaacggatcagggcacaggttataggtcgaatgaatatgggcaagattatgtaggtgctttgaaggaagtaactacagaggctcaaaatataaaaaacgcgggatataaacttgttacagctttttgggaagataaaagtatactagcagcatctgaccaatattatactaagtacgataaagaagtaggtccatatgcaaggcaagagttaaaaaagatggcaacaaaaccggaatggtttgtactggcaaatgatattgaagagtttacaaaaaatttaattgaaaccgttacaaaagtgacaaaaaaagaaaaagataagttgattttaaatattaataatgatttgctcgtaacaggtgtgcaagggtctggtccaaatggtgttaatacaaagcctgttatacaagggaatcagatcatttgggatttagacggacagccagaaggaacgtataaagtcacttataaggtgaaggaaaaaacaccgcaatcgaaagaatttaatgttgcggatggatattttatgttctttgatcaaaagtttgatattcaagccgtcaaggcacttccgaatgaaaatgctactaagtgtaatacggcggtaacgaaaaaagtttctgattcagatcaaaaactggtcgatgaggcattgttaaattcattgcatgaagaatttgtatatgatgtcaattacaactttggatttgatatggagtcaaaacaagaaatcgttatacaagatgatttggaagatattttagaagttttagagacgaaattagtaaatgaaaaaggcgaagttgtaaatatagcgccagttatagataaagaaaagtcaattgtaacgtataagttgccaaagcaaaatgattcgtacgcgtatttagctggtggacaatatcgattaacgattaaagcgaagataaagattggtacaaatatcgatgtgatcaaagggtacctagataaaggtggcgttccgaatacggcaaagctcattatagataacaatccagttgtttctaataaagtcattgtgaagccaccaattgaagaaccgaaattacgcaagactgtatcggatgatgatgaaaagaacgtggaaaaggctacattatccaatgtaaaagagaagtttgtttggaatgtgcagtatgaatttggaagttcaccaagtggatacgattctatcgtattacaagatgatttagaagatgttttagacatattagatgtgaaggtcatcaataaaaaaggtgaagtcgtaaatataaaacccaaaattgatactgctaagaaacaggtaatgattgaagtaccgaagcaagaaggaagttatgtgtatttaacaggtgaagtatatacggtgcaaattacatctaaaattgctgatggtgtaaatcaatcagaattagcacgttatatagtaaaaggtggaatcccaaatacagcagagttagtactaaataataagtcagtgaaatctaacgaagtgtatgtggttcctccgaaggaaaaaccgaaagtaacaaaaaccgtttctactcaaaatgagaaagaagtggaaaagggtacattgcaagagagaaatgaagagtttacttggaatgtagcatatcaatttggtaatgatacagcaaatttagagaaggttaccttacaagatgacttagaggatattctagatattttagatgtgaagcttatgaatgaaaaaggtgaagttgtaaaagtaacaccgaacattgataagcaaacaaagaaagtgacaattgagttagagaagaaagatggttcatatgcgtatttagctggtttaaagtacacgatgcatattaaaagcaaaatagcagaaggtacaccagtagaggtgttagcgaaatatattgcaaatggcggcgtgccaaatatagcagagctcatatttgataatacgccaattagttcgaataaagtagttgttattccgccatctataggtaagatcgaaattgaaaaggtagatgcagctgatgaaaatattaagttgcaacatgcggaatttcaagtttttaaccaagaaggaaaagaagttggaaagttaattacagatgaaaatggcaaggctagcttagagaaactaccgtttggaaaatatacgattaaagaagtgaaagcgccgaatggatatatgttgctccgtgatccaattgaggtcgaggtaacggcagcgacacctacacaaacgttaaaagtagaaaacaaaaaaagcgagtgggaaattccaaacacaggcggtgctggaacaaatgtattttatttaattggtacttttttaatgattgtagttgtatttttgtttttccataagagaaatagtaattactagaatattaaattggtagaagaggagaacgagaaatgaaaaaatttttaagtatgtttttaatctttttgctagcatttgcttcattgccaagtatgttaataaaagcggaatcgaaaagtgaaaaaaaaggcacgttaacaatccataaatttgaacaagagccgcttaataatccagctttaaaagaaagtagctctaaaggagtagaaattcctaaagatgcgaagcctttagcaggagttgtgtatcaaattaaacaagttgaatcatttggaacaatttcaaacgatgggaaaattgttaaagaagacatcaaaccagtaaatggagttccaattgaagttgaaacgaatgcggatgggattgcattttttggcgatttaccactaggtcgttacgaagtgaaagaaatttctggaccaccacatgtaaatatagacacaaaaacatacaaagttgatatcccgatgacaagtgaagatgggaaagtattaacatatgatgttaaaatttatccgaaaaatgaaacgaaacgtggtgcagtagaattaacaaaaattggtgtggaaaataaagcgttaaagggtgttcaattctctttatataaagaagatggaacagagttagaaaaaggtttggagacagatggaaatggtaaaattcgtgtcggtaacttatcgtacgggaagtattactttttagaaacgaaagcgctagatggttatgtgttggatccgaaaaaatatgaattcttcattaaagaatctggtgtaattaataaagatggtacagttacttctggtgaagtagttaaagttgatgtgaaaaactatgaagaaccaacaattgataagaagattaatggagatttaaacaatttaccaattaatacgaagacggattataactatgatattaaaacactaattccagaagatattaaggattataaatattatgtcgtaacagatgtattagatagtcgattagaaattcaagatcaaccagttgtaaaaattgatggtaaagtagtagatgcaagtgttgtagaagtagttgtagacggtcaaaaagtaacggctactgtaaaagatttctctaaattagataacaaaaaagagtttcatttgcaaattaaagcacaaattagagatggcgtagaaacaggagtagagattccgaatacggcaacaattacatttaaaaacaaagatgatgtaacaggtgagaaggcaacaaaaccagttatcgttactccaacgactggtggtattacattaacgaaagttgatgggaaggatggtaagaaattagaaggtgcagaatttgcgctgcaagatacaaaaggaaatccagtagaaatcgatggaaagaaagtagtaggtacatctgataaaaatggtgtaattacatggaataagctaccttacggtgagtatcaagttgtggaaacgaaagctccaacttatgaaaaagaagatggtacaacaggtagttatcaacaattaagagagccaattcatgtaaagattgatgctgatcataaaacagttacacttactgtagaaaataataagagtggatggattttaccttcaacaggtggtatcggtacaatcttatttactgtagtaggtcttgtattaatgataatagcagcatttgttttctttagaaaaaaagcaacaaataattaataagcgatttaaacggtaatgaaaagaggagagggaggcctttcctctttttcggcattttagcccgttatttgagggctaacaatcagtggggtgaacaaaacctacactgattaaagtttcactttataggaggatatgatgaaacgtaacattatatttggtgctatttttttattgggactttgtattttcttatatccaacagttagtaattggttagcaacacgagctcattattcagcggttagttcgtatgataaaaaagtaaaagagttacagcaaaaagaaattgaacgtaggaagaaagaagcgaatgaatataataaaaatgtccagacgacgtcacagtcattttcggatccatttaatgaaaaagggggcgacgagagtggacgttcatatgcagatgtattaaatgtaggtgagagtatggggtatattgaaattcctacaattgatgtaaagcttccaatttatgctggcacatctgaaaatgttttgagccgaggagtaggacatattaatgcttcttctttgccagtagggggagaaagtacgcatgctgttttaacggggcatcgtggtttgccttctgctttattatttacggacttggataaggtgaagaagggagatactttttacatacattcattaaataaagtgcttgcttataaggtggatcaaataaaagttgtattaccaaatgaaacaaatgatttattagttgtgaaaaataaagattacgttacgttagttacatgcacaccttatggagtaaatacacatagattgatagttcgaggggaacgggttccttttgaagtggaagaaaaggaagcagttgtggctcaagtgaatccatttgtagtagaaaagtggatgattggaatagtaatcgttctattatttttcattggaatgtttctttattttaaagtgaaaaaacgttaaagtacgagtgatggaaatatttttagaatatagttattattcactcgataaagaaagtgtgatatgttatggtaaagatttgaaaagattccgtaattttataaagagggaataagtatgtctaaaagaaaaatattgatagtagtattcttatttatcctttgtattgtcggttttcgttccatttggtttaaacaatctctttatataaatcaaccacatgctgaagaagggatagtaaatttatcagatataacatttggcgaaaaaaatttagttacgttaaatggtgaatggaaattttatccgaatgttttacttaccccggatcaaatgaaggaaaataataaagattatgaatatattaatgttccggggaactggaaagaaagagttgatcgtactcatcaaaaagaatatggcacatatgcgctatctatcaaagtgaagaattcgaatgaaaattacggcttaaaaatacagcgtgttcataatcagttcgatttgtatgtaaatggagaacttgtacaggaaagaggaagtatttttaaaccgaatgatgtacataaaacttcacttacaccaactgtcataaaggtaaaagcgaatgaacaaggggtaattaatcttcttattcctgttacgaaaacgacacaagaatcgaaacatggcgggattacaggtggagtgcgttttggcagtgaaaatgctattgtacaggatagctttaacaatcttatgatgcaaattattgcaacgacaatagtgtttttacatggtatatatgcatttatcatttttgtgatgaagccgaaaaatgttgagattctatatttttcacttggtagtatatttgcaggtattatatttttaattacggatgaacgttttttgttctctttgtatgaatttgaattttcaacatatatgaaaattatatatacatcgtttgtaggtttcgctttatttattttactgtatatgaaaaggtttttacgaggttatggggacaataaatttattttatttaccatcgtattatgtggaatttatgttttcgtagtattgttttcttcacctagactagtgcaagattttggatttatattattttttacaattattattccattcattttaacagcaattattgttttacgagtggtggaaagtggaaagtatgatttaatctttttactttttacagtgattagtgctacttctggagtattgtgtgcgagttttaaagagtttgcgttcatgtatagcatagggtttgcgaggatatttgatgcggatttttatccatttgatatttttttagcaatggtatcattttcgactttttggtttatccgattctttcgcacgagtgatgagaatagtgaactggttggaaaattaaaagaagagcatcataagaaagatcaatttttagcaaatacagcgcacgaacttagaaatccgttacatgggatgatgaatattgcacaaagtgtaatggatgaagagaaagcgataaatggtgaaagtaaacaacatctaaaactattaatgacaataggaaggcgtatgtcgtatttgttgaacgatttaatagatgttacaagaatggagcagaaagggataccgattcataagagaccggttgatttgcaaccaattattacaatggtgattgatatgcaaaagtttattggagaagaaaagaaattacaaattatcgcgaatatccctgaacggtttccatttgtattagctgaccaaaatcgtcttattcaaattttatttaacctacttcataatgcagttaaatttacggatgaaggggctattacaattgatgttgaaaaacgaaaaaattacgcggctattcaggttacagatactggtattggaattgataaagaagcgcaaaagcgaatcttccttccatatgaacaaggtagtgattcatatggtgaaagtggaggatttggacttgggctaagtatttgtaaacaattagtggaaatgcacgggggaacacttactgttacatccgttttacacaaaggctctacttttacattcacattaccacttgctgaaagagaagagatgctaattgtgtcaaaagaaacaattgaaaaagtagtggaattaaaacaagttgaaatgaaggataatcgagtcggtaatagaaggagaattcttgctgttgatgatgatcctataaatttaaaagtattaaagagtatattaccacaagatgaatatgaacttgaaacggtaacaaccggaagagaggttttggagcggttaaatatggagtgggatatgatattagtagatgtgatgatgccgaaaatgtcaggttatgaattaacaaaaatgattcgtacccaatactctattgcagagttgcctattgtactgttaaccgctaggtcgcagccagaagatatttatacaggatttcttgctggggcgaatgattacattgtaaagcctatagatgcactggaattaaaagtgagaattaatgcattaacagagttaaagcaatcaattcatgagcgaataagaatggaaggtgcttggcttcaggcgcaaattcagccgcattttctgtttaatacactaaatacgattgctgcattaggtgaaattgatattgttaggatggagaaattaattgttgagtttggaacgtatttaagagccagttttggtgaagaagtgttagcggaaaccgtacctatacagcatgaattagatttacttcaatcatacctttatattgaaagagagcgatttggaaagagaatacagagcgtgctggaagtcgaagatggaatagaatgtgtagtaccaccgttttctattcaaacattagtagagaatgctgtgcgtcatggtatattaaaaaaagcaaagggtggaagcattcatataaaaatagagagtgtgagtggatttataaacatttcgattgcggatgatgggataggcatgtcagatgaaaaaataaaagaaatattagtgaaaaaaccgaatcaaaaacagggaataggtttattgaatacggatgcacgattaaaacagttatacggaactggattagaaataaaaagtgaacttggaaaaggaacgattgtttcattccagcttcctgttgttatggataaataaggttgttaaaaaatccgaagtgatgagcgcttcggattttttagtacattttttacttattcccctctaacaaaatcttctctatctcctcaaagtgatgagtgcgagcatgctctagcggggtaacaccatcattgtctggaatatttacatctgcaccgtgctcaataagaaggcgaatgacttgttgctgtgtttcgtttccgttacttagtactatggcttccattaaagctgtccatcccaggttatttacatgatttacatcaatatttgttcgagtgaggagttcttttataacgtcaatatagccatgttctgaggctgggataagagctgttccgccgtaacgatttgtaatcgtaggatctgcaccagcatcaattgttaattttaaaatgtctaagtaaccttccgcaccggcgtatagaaagggattatttttcatgtcatcttggatatttacgtcagcaccagcttcgataagtgcctttgcggtttttacatcatttttgtatgtagcaatcataagcggagtgcgtccttgactatccgtcgcatttatatttgcgccttgttttagtaaagatataacagtattcgtttcatttttttcagtggctgctagtagtgcagtctccatgtttatcatctccttttttacttcttgttcttgcgagcatccttgtaaaaaaattacgcaacatatcatactgaatgtttttttgaacatggaatttcaacctcctaatttcaactgtaaaataggaacattaaatttttataaactgacgctaaaattactataaaatcgcttgagtaattgaacatatatttttatgcttataaataataaggtttgataaagtgaggatttaagatatgtctattaaaacaaggtttttattttcttatattgctgttatcctcgtttccattacgcttatattagtcgcgggatttttaatcgttttttcgataacaggtgacttggaagcagtgaaaaatttctataaaagttcttacattcaaaagccgcttacaccagaagaagagaatgcctatcttgagttgaagtcagcagccaaacagcatcaatctcaattgctagatgagtcgtttgtctcagcaatagaaaaagagggtgtgaaaatagtagtaagaaaaggagaaacactttcatatgcttcaaacgtatttgaaagtgtatctttaaaagaagcccttccgaaatttgaatcagcaaatattaatagtcgtggtacaacggaactaggcgatacattttatcgatatgtaaagtttgatttttattttcctcaggaagaagagggaagtatatttgtattaaaaaagcaaagttcatttgtagatcttacacaaaaattatttccaatcttattcgtatcgcttttactactagccattttactcattggattattaagttacctcgtttcaagaagtgtaataaaaccaatttttgtattgaaaggcgcaacggagaaaattaaagaaggaaatttagattttcaaataccaattacatcacacgacgaaatagggcaattaaatcaagggtttgaggaaatgaggaagagattaaaagaatcgatagagatgcaaacacagtatgaagaaaatcgaaaagagcttatttcaaacatctctcatgacttaaaaacaccgattacatcaattataggatatgtagaaggaataaaggacggggtagcaaatacgccagaaaaaatggataagtatttaacaactatccatacgaaggcaaaacatatggacacactcattgatgaactctttttgttttcgaagctcgatttgaatcgagttccattccagtttgaaacagttgaattaaatacgtttatgcaagaattaatagaagagatgcagatggatttaagtaaagaaggtatagaagttaacttacaattacatgcatcaacactatatgtaacggctgattgtgaaaaaataaatagagtgatatcaaatttagttcataatagtgtgaaatacatggataaagaagagaagaaaattactgtaacagtatcgagtgataataataaagttattgtgaaagtgatggacaacggatcaggtatagaagctgatacattgccgtatatctttgaacgtttttatcgtgcagagcaatcgcggaattctagcacaggtggaagtggacttggtttagcaatagcgaagcaaattgttgaagaacatggcggggaaatttgggcggaaagcgagcttggtaaaggcacaagcattttcttctcattggaaaaagtagaggaatgtggtgagtaaattgaaaagaattttattaatagaagatgaagtaagtattgcagaattacagcgagattatttagaaattaatgatttccaagttgatgtagagcattcaggagaaataggtttacaaacagctctgcaagaagactatgatttaattattttagatattatgcttccgaaaatgaacggattcgaaatttgtaaacaaatacgtgctgtaaaagatattccgattctacttgtttcagcaaaaaaagaagatatagataaaattcgcggactcggattaggagcggatgattatataacgaaaccgtttagcccgagtgaattagtcgcaagagtaaaagcacatattgcccgttatgaaagattattaggaaatgtaagtaagcaacgtgatacgttatatattcacggaatttctatcgatcaacgagcgagaaaagtttttataaacaatgaagaagttgcgtttacaacgaaggaatttgatttattaacattctttgttacacatccaaaccaagtattaaataaagaacagttatttgaacgcatttggggattagattccgctggtgatttagccactgttgtcgtccacattagaaagctacgtgaaaaaattgaaagagatcctgctcacccgcaatatattgaaacagtatggggagctggttatcgttttaacgtgtaatatacctgccgagtaattggcaggttttttatgttatttgtcaaaaggaaataataggtaatttgtgttaagatataaagagagataaaacatagtagagcatgagagggtgtgctacattttgggagatacattacaagataataaatcaaacaaggtcttaaggattggaactaatattataattattttattaattattggtgcaatacaaatgttttatgataaagattatacaaatgatcatttcggctggttatttttagtattaggttggatagttagaagcatttttaatattacgataggtttaaaagaaggagataaaaagtcagtgttgtttgatgtaggtttggtgctcttttccttttatcttttatttttatatagtacgaaatatttcttctgaaaatttagctcatagtcttatagagactgtgagctttccttaataataacggtactggcgtaacgatttataaaatatttgagtagtagaagtaaacagggtcgcttcttctaaaaaaggataatggttgctgttttcgaatggaatgaagatagagttacgtatcccatcatgtatctcgatagaatattgaactggacactgcacatcatatcttccgcatataataagtgtctttgtttggatgaaaggtaaatactctcttaaatcaaatgaaggatattcattggcgaaagcgttcatccggctaacggacattgttttattgattggtttacaaaaataagagttgtagttttctggtttatacaatgataattttgttctctcagtagatagttcttttcgttcttcacttgtaaggtgagggctttttaagttttcgatgtgtttttgcatataatgaaactgtggatgtgctgggtgataaatgcaaaatggtgtttcggtatagttacttgctgcagctcctgctacgactaatgattgtaaggaatttggatatgtaatcgcatataaaagtccaagcataccacctgttgaatgaccggcgaaatgccatgttggaagttgtaatgcttctcgtattgcttctaagtcgtggattgtttcaatcatgcttaattcgttttctgactgggcggttacagagcgaccagtatctcgtaaattaatgagaaatacacgatgcgtagcagtaaaaacatccgcaaagtaatcaccagtttcattaaattgtgaatagtgatgtgtaatacaaagcgattcgccatttccttttgtaaagagttcaaatgtaccgcgtttcgtgttgattatttgttgtgtccacataatatcacgaccttttctcataaaagttgggccagactgttataaaatgaaaatatatcagcgattattagaatatatcggcgcaactcggaatatatcagcgattatcaaaatatatcggcgtaactcggaatatatcagcgattattaaaatatatcgacttaccgacagaaaacgacaataatagcaagctttaaataaaaggaggctattcaaaaacgagcctccttttcgtttagtataaagattttgtcatattattccgaataatttcaagggatttcgctacagttaatgcgtttttttcttcaatttctggtttacgggggataggtttatacatgttgtctggatcttcccatgtgaggggaagttctgtttctgcttgtcctttccaagcttcaatccattctggagggagataacctgagatgttttggatgttgttcatttcgagccaaatgagtgcccatgctcttggtacgacacgccaatggtcatagccgccaccgccgacagcgatccagcgaccttcgcaatattcattagcaatttcacgagcgagcttcggtatttcgcggtaaatattcattgtcgcacaaagatgtgtaagtgggtcataataatgtgcgtcagcaccattttgcgttaaaataatatccggtttaaagtacgctgcaacttctgttacaacagttcgatatgattctaagaacgattcatcttctgtaaaagcatcgagtggaacattaaaagaataactataaccattaccttggccacgttcgtttacagcgccagttccagggaataaataacgaccagtttcatgcagtgaaatggtgcatacgttagggtcatcataaaacgaccactgtacgccatcaccgtgatgagcatctgtatcaatatataagacgcgtaaaccgtatttcttttgaatatattttattgcgatagaactgtcgttataaatacaaaagccagatgctttgccgcgaaagccgtgatgtaagccgccgcccaaattaagtgcgtgttttacttttccggaaagaacagcatcgacagctgttaacgtaccgccaacgagcaatgcgcttgcttcgtgcatatttgggaacatcggtgtatcttctgttccgagtccatatgtcattgcaattgatttttctaactttccttctccagcacgttttaccgcatttatgtactcctctgtatgaacgtaggcgatctcttcatctgtagccatccgtggtgagatgatttgagagggagagatgaaaccgcccttttgtaataaatcatacgtaagtgtgacgcgcagttggttaaaaggatgatcagggctaaatgaatagccccgaaagtcatccgaataaataaacgcgctactcatgcttgcatccccatgatgtttggccataatacgcggtaaccttctgcttcaagtgcatcaatcacttttagaggattcatcgtttgaatgcggaaaacgagtactttatcattctcgtcttttgctgggtagacgagaacgctcacgatatttatttgtaaatcactaaaaatagcaacgacttttccaagaataccaggttcgttttttacttgaatttcaatttgcgaacttggttgatgtgctcctgttaattttactaatgtgtgcagtactgtagattcagaaatgattccaactaacttcccggcctttgtaacaggaagacagccaattttattttcaaaaaataaagtagcaatttcctcaacgaaatcgagaggatggcaagtcataacaggatgtttcataataagttcgagcggttgctgtagcatatcgattgaaacttgttcatctagaatagacggacttgcatctcttacatcccgatcagaaataatgcctacgacgtgattattttgatcgacaattggaatgtgccgaatgcctttcgtgcgtatcgttcggattgctgtttcgattgtatcgtttggatgcaatgtaactacattttgattcataatttcttctacaatcattccagttgccccctttattaatacataaaacgattgtgaaaacgtagacgatcaaaagcttgaatagaatccgtatcaacgcgtttaccgatgcggaccattaaacagttggcaggatgtgaacaaatttcaggatcgtctgtagccatccattgtaacccgccagcattcatcatcttctccattacttttcggtattcccacacattcaatcctgtttgtttcaaatcccagtgccaataatattcagtcgtcaatataatgtaatcttccatataatcgtccatcatagaaacctctagtaagttctttccgacagaactcccgcggaaggctgggactacttcaattgccccaagctcaattaagttttccatttttccttctgaccatcgttcaagtggatcaggatacaagtatgtaacatatccaacaattgtttggtcatgtctagcaataatgagacgagcttctggtaatttagaaatttcgacaattgctttatattgttgctcggcaggacgaaacgcaattaagtctggatgaaactcatacatttctaagttatgtgtagagacaggaccttcaataattaaagtgcctttcgccgtttttaagtttctagcattatatatttttttatgaatcaatgtattgctcaccaccttgagggtttgtgaatctattaatatcgtactttataatatatgcgatgtgaatcgaaatttgtcattaaaaatttgtctaaaaatcaacaaatatactgaaaattttaaataatgtcattataatagataatagaatacataggagggggatgtaaagtatgaaagtagaaacgcttcctgtcattaaaggagaaaataatttgccgaattatgatgaggcatacgcgaattttaactgggaagaggttaataaaaactttacttggaatgaaacaggccgagtaaatatggcgtatgaggcaattgataagcatgcgaaatccgatcgaaagaataaagtagctctttattatcaagatggatcgcgaaaagagaaatatacatttaaggaaatgaaggatttttctaataaagcaggaaacgtccttaagaattatggcgatgtagaaaaaggcgatcgcgtttttatttttatgccacgttctccagagttatatttcgcacttttaggtgcagtgaaattaggagcaattgttggaccgctatttgaagcatttatggaaggcgcagttcgcgatcgcttagaagatagcgaagcaaaggtgttaattacaacgcctgaattgttagagcgcgtaccattaaatgatttaccggctttaaaaacagttttccttgttggagataatgtagaagaaggcggtaaaacggtagcgttcaatcctttatttgaacaagcttcaaaagaattacatattgaatggttaggccgtgaagacggcttgattctacattacacgtctggttctactggtaagccaaaaggtgtgcttcatgcgcaaaacgcaatggttcagcactatcaaacggcgaagtgggtattagatttaaaagaagacgatgtatattggtgtactgctgacccgggctgggtaactggaacagcttacggtattttcgcaccgtggttagttggagcgtcaaacgttattttaggtggacgctttagtccagaagcttggtatgaagcactgcaagattacggtgtgacggtttggtacagcgcaccaacagcattccgtatgttaatgggagctggacaagacgcaattaaaaaatatgacttatcacaagtgcgccacgtattaagcgttggtgagccgttaaatccagaagtaattcgctggggtatgaacgcatttggacttcgtattcatgatacgtggtggatgacagaaacaggtggacaagttatttgtaactacccttgtatggaaatccgtccaggctcaatgggtaaaccaattccaggtgtgaaagcagcgattgttgataatgaaggaaatgaagtgcctccttacacaatgggtaacttagcaattgcgaaaggttggccatctatgatgcgtgggatctggaataacgagcaaaaatatgaatcttatttcatgccgggagattggtacgtatcaggtgactctgcctatatggatgaagatggatacttctggttccaagggcgtattgacgatgtaattatgacgtcaggtgagcgcgttggtccgtttgaagtagaaagtaaattaattgagcacgctgctgttgcagaagctggtgtaattggtattcctgatccggtgcgcggcgaaattattaaagcatttatcgcacttcgagcaggatacgaaccatctgatgaattaaaagaagaaattcgtcaatttgtaaagaaaggcctagcagctcatgcagcgccacgacaaattgaatttagagataaattaccgaaaacgagaagtggtaaaattatgcgccgcgtattaaaagcgtgggagttaaacttaccaacaggtgacttatcaacgatggaagattaagagagaaaggtctgaacgaaaaatgttcaggcctttcttttttatgatatcatgaacttatatatataagttaaaggggatagtatgatgaaaacagaaaaagaaaagatgatactaggtgaaatgtacataccagctgatccagttttagttcaagagagggagcaagctcgtatattaacgagaaaattaaatgaaacgccagaagtacaattaaaagagcgtagcgaaatcgtaaaagaactattcggaacgactggagataacattcatcttgaatcttctttcagatgtgattacggctataacattcatgtgggtgaaaatttttacgcgaactttgactgtaccattttagatgtatgtccagtaacaatcggagtgaactgtatgttagctccaggtgttcacatttatacagcaacgcacccgcttgatccggtagagcgcataagcggatcagaatacggaaaaccagttacaattggcgataacgtatggattggcggaagagcaattattaatccaggtgtaacaattggagacaatgcggtgatcgcatctggtgctgtcgtaacgaaagatgtgcctaataatgtagtagttggcgggaatcctgcaaagattataaaaaaactaaaataatatttgaacgaagtgccttcctcgtctgtatacatttatgaaagaatagatgagggaggcttttatatgtctaataaattacttcttacttttgctgtaattggaattatagttgtattttcttgtggtcttttcttaccgataccaattggatatagagtatcaatgcttacagctggagttataatgggtgttatgttttcaatcattattccatttgatagaaaacatatagtacggaaaaatggatataaaattgattttacaaaaacaaaagtgtattttcgctggaatgtatttgacactatttctatctgccttgcgttgtatgcatgcatatgtgtgcaagcgttaaatactttagttactatgggatttacgattcaaaacccatatgtgcaattttttacaaatcaatcacaattgtggatttttattgcgattgcatatttaatttcccgtatttcattaacgttaaaaggaataaaggagatcaaaaatcatggcgcagattgggattgaggaggagctcatgcttgcgtatcaaagtggagataaacaagcgggagaaagactatatgttttaatcaaaccagcgctatacacatttttatatcgatttaaccgagatgaacaattaagtatcgatcttgtgcaagatacgtttttgacgctagagcgtaagaaacatatgtatgaacttgaaaaaggtaaaataaaaacgtatttatttcaaattggttatcgtcttatgattaataaattaaataggagaaaaaagtggcgtacgcttttgccatttttagtgccgattccggaaaaagaattttctcacgaagatcggctcacagtaagagaagcaattttgaaagttccagaagagcaaagagcggtcctaatcctttcttattatcatgacatgcagcaaaaagaaattgcagagatattaaacattccgattggaacggtgaaatcgagacttcataacgggataaagaaattgaaacaattgctggaggtggacgaaattgagcgaaaatccctttaagagtgaatataagttaaagcaacatttagatagtgatcatgtagaaataccagactttccaaaaacggtaagtcgattcgatcgattaatcgggtttcttggttccccagcgaaagatcctgtggaggcgaccattgggaatgatttatcgattgtgtttcatgtatcgttattagttggggttccaattctttctcttattacgatactctttatggtgttgtaaaggattgacaagaagggaaacctgacctctatttgacatgcctatataaatgatggtataaagaaaagtatatgaataattgagcgtggaaagggagaagtagtgatcatttccctgttttagagagctgatggccggtgaaaatcagcacatagatgatcgcgaattacgcccctagagcatcttttttcgattgaattttattcaaaagggaaaagacggtgctaagccgttatgtaaataaggtggtaggcttttttgcctgcaactagggtggtaacgcgataatcaaaatcgtcccttatttgaaggggcgatttttttatgttttcaaccttcacgccagtaatgaacttaaaggagagtatgtaggatatgggtattttacaagatcttgaatttcgcggtctaattaatcagcaaacagatgctgagggccttgagcaattattagaaaaagaaagcgttaaattatactgtggtttcgacccgacagcggatagcttacacattggtcatatgttaccagtattaatgttacgtcgtttccaattagctggtcaccaaccaatcgcacttgttggcggtggtactggtatgatcggtgacccgagtggtaaaaaagcagaacgtacattaaatacgaaagatacagttgcttactacacagaaagcattaaaaaccaactttcaaacttcttagagtttgaaaacgtggacaacccagcaacgatggctaacaactacgactggcttggtagcttagatgtaatttcattcttacgcgatatcggtaaaaacttcggtttaaactatatgttagcaaaagatacagtagcatctcgtttagaaactggtatttcattcactgagtttagttacatgattttacaatcatacgacttcttaaacttatatcagcaacataattgccgtctacaaatcggtggtagtgaccaatggggtaacattacagctggtcttgaattaatccgtaaatcagaagaagatgcgaaagcattcggtttaacaattccactagttactaaatctgacggtacgaagtttggtaaaaccgaaggcggcgcaatttggttagacccagagaaaacaactccttacgagttctaccaattctggattaacacagatgaccgcgacgttgttaaatacttaaaatacttcacattcttatctcatgaagaaattcttgagcttgaaaagcaagtagctgaagcgccagaaaaacgtgcagcacaaaaagcattaggttctgaaatgacaaaacttgttcatggtgaagaagcattagagcaagcgattaaaatttcagctgcattattcagcggttctgtagcagaactgactgcaagcgaaatcgagcaaggattcaaagacgtaccatctgtagaacgtactgcagaagatacagtattaatcgacttacttgtagaaagcaaaatctctccatcaaaacgtcaagcacgtgaagatgtaacgaatggcgcaatctacgtaaacggtgagcgtacacaagcattagactacgttgtaacagaaaacgaccgcatcgaaggtaaattcacaatcattcgccgcggtaagaagaaatatttcttaattcgttactaattagaaacgaatgtaaacaaatagtaccccgaattgtaggctgaaaagtctatgattcggggtttttatgtatggatttaaatcgccggatcttttcttttaaatagaatataaagaattaatatgagcatataaagtaaactaactagcataacgataaatgctgttggataaaattttgccgcatatataaagaaatcgatttgataaatatcttggtaatttgaaacggtgcctttaaagtaatttgtaaacttagcgctatatttccattcatcaggattatctattaaattactcccctgataccaactcatcagtgcggaagtaataaatagcataaatgaacttccgagttgaaccatttgatttattgtcaaaaagaatccacctcccattttatggttattataacgtgcattcatatgcttgtaaccattttgttgtaatctccttttcgagttcatacggaaatcacatgtaagcggtatgataaatgtataacaactagaaaggagtggtaaaacgaaatgtcactagaagcgctcattattttttctttgctaaatgcgggtcagcttgcagagaattcgaaggtggatgtacataaagagcagaaagatgcttatgtatatgttcagaaagaggaaaataaataactttaatatatataaataaaggctgccagagaaaggttttagtttctttggcagcttttctattgaaatgttttattcatcctcattttggaagcattaggtgactaaaacaactaatgtaagtttattaattataactacatctttatctttatctttttcgtcatcataatcaactgattttgtttttccacctacaaagttagctaaaatacttgttattgattctgagtctagtaatttgccgatctcaatattttgcttctttggcacatacccctttaaactccattttgtacattttgtatttcattcaatgttgaagacattatatctacataatctatcatagcacctatgtttaacttggctgtttcagtatcattttcatttaaagctataaatgcttggtctaccatttgtttaattgctcttgcatcgtctcttaattgaactttgaagtaatcatactccttaggaggttctatacttgctagtctattagctctcccacttactctacttaattctccctttaatcctgtttgagttgttttccacgttccatctttttcagctaaggatttaatagattgaactgccgtctttaagtcattagaagtatccttaatatcttcttgatacttctctaaaggagaagatgcactagaacctttagttaactgcttatctctatactctctttcctcagctagtgttctaccttctccaattacagcttcttttactgttttatcgtttgagacttcatttttatctgtatcctctttctttttcgttacctctttttcttccttagctttcttttcagcaagcaatttttccttttcagcaagcaattcttcctttttagcaagcaattcttctttttccttgtttagcttatctgcttctttgtctattgactcgtctttcttcttttctgactctgaaatctttaagctatcagtcttattctcttctgtattgttcttagaacatcctacccacgctactaacataagtggtaatgctaaaaaacatattagtttctttgctttcattgcgtatactccttttaaaaagaattgtaattaattaacatatgaaactataacataagttacataaataagatatatagatatttcatccttaagagggttttaacaatatgaaaacatgtattacggttgtggagaatcccactccgtatacttttaaaaaattcctttataaattccttagcgtttgggggcttttttatgctttcataaactctttatcaaagaagttgtttacgtaactgattatttttgtaagggtattaataaaactcaaagcgaacttatccatattcataatgaaagggtgatgaaatgattattagagaaggtattgaagtaactagaataactttagatggtatgaattaccgattccagaaggggattctgagtttctgcttcgtgctggatattgggaagttggtgaaaaagtagaaagaataaatcgtgaggaaattctggcggattatgacagaaaggtttttctggaagatggaaaattgtgtacgatactcacttacaaagggaataaaaagaaaagatgtgatagaggatgagtgaagaacaaattattcgtgatgaatatgagtatgtggtgaaagtaatccttacaaaggaacagcggaagaaatttttaacaccgttaataccagctgtacgggagctaattataaaaaggaaagtagaacaacgaaataagcaaaatgaaagtatgaaagaaggtgaataacaacattcttgatattaaaatagatgaacaaaagattgaagaacttttcttagaagagttacgaaaacggctagatcatattgaacatagaaaaatgttttgggatatgaaagaattgtgtagacaaacatgtatgagtggaaattccatcagagaaaattgcttttatgatgaacgtttcccgaaatttaaaatagatggaaagtggtatttttcagcgttagaagtggaaaagtttcttcttatgtagataaaagaacaatgaacaattttaaagaaagaagggctaataattattaattactaataagatgaatgtactacggacctacagaggttttattattttacttacacttatccatttctatacacacgccagccatattattttttgcccccagtacattcttttttatgctttatataaataaaaaaagcccaggaaccttgaattaacaaggttcctaaggcttttaatacgactcttttcagagtaccgagattaacgagagtagaactctacgattaatgcttcgttgatttcagctggtaactcagaacgctcagcgtgacgagtgtaagtagcttctaatttgtcagcatcgaaagttaagtattctggtacgaagttgttaacttcgatcgcttctttaacaacaacaaggctgttagatttttcgcgaacgctgatagtttgaccaggttttacacggtaagatgggatatctacgcgagcgccatcaaccatgatgtgaccgtggtttactaattggcgagctgcacgacgagtgcgagctaagcccatacggtaaactaagttgtcaagacgagcttcaagaaggatcatgaagttttcgccgtgcttaccaggcattttacctgcttggtcaaatgtgcgacggaattgacgctcagtcatgccgtacatgtgacgaagtttttgtttctcttgtaattgtaaaccgtattctgaaagtttcttacgttggttaggaccgtgaggacctggtgcgtaagggcgtttttctaattcttttcctgtgccgcttagagagattccaagacgacgagacagtttccaagctggacctgtataacgagccatagttgactcctcctttaaaaatgtttttatttacgtaaaataaaaacagacgtaatcgatatttacgggcattttgttttcatgtaccttcgctccagcagcagggagttacgagatacacctccgtagaggaacaaaatacaaacgataaactcacattacaaggctgcctttttattttacacaaacgctattatatcttttacccagagtttcgtcaagcgagtacgtttttgttttatgcatataaattttggaaattaatataagaaggaatttaaaacaatatagaagaagagatagaaacacaaataaagcgcttacataaaatgaaggaaaatgttcatcaaatttttatggatgaatatgcggcaataaaaacataagggggatgtttttatgaaaaagaagcatatggagacagcgttaattcatcacggttatacatctgaggaacataaaggaagtttaacaccacctttatttcaaacttctacatttacatttgagactgcgcagcaaggagaggcgagttttgcgggagtggatccatcttatatttactcacggcttggaaatccaactgtgaaattatttgaagaacgtatggcggtgttagaaggaggagaagaggcacttgccttcggatctggtatggcagctatttcagcgactttaatcggttttttaaaggctggagatcatattatttgttcaaatggattatacggatgcacgtacggttttttagaagtgttagaagaaaaatttatgattacgcattcgttttgtgatatggagacagaggttgatattgaaaataaaattcgcccaaatacaaagcttattttcgttgaaacaccaattaatccgacaatgaaattaattgatttaaaacaagtgattcgggttgcgaagcgaaaaggcttacttgttattgttgataatacgttttgttcaccttatttacaaaggccgcttgagcttggctgtgacgctgttgtgcatagtgcgacaaaatatattggtggtcacggtgacgttgtagcaggtgtaacaatttgtaaaacgaaagcattagctgaaaagattcgcccgatgcgaaaggatatcggcggtattatggcgccgtttgatgcgtggttattattacgtgggttaaagacgttagcagtaagaatggatcgtcattgtgataatgcagaaaaaattgtatcgttcttaagaaaacatgatgcggtagaaggtgtttggtatccagaaggggagttagcatctcgtcaaatgaaacgcgggggcggtgttatttctttttcagtaaaaggcggaaaagaagagacgcaagcgtttattaatgatcttcactttattacaattgcggtgagtttaggagatacagaaacgttaattcagcatccagcaacgatgacgcacgctgcgattccagcggaactaagaaaagaaatgggcattttcgataatttaatacgcttatcggtcggtttagaatcgtgggaggatatcgtttctgatttagagcaggcattaaagaaaatatctactgttaatcaatgaaaaaagagtgagctatcggttttgtacaggacgtactaaatcgataactcgctcttttctttttacatatgttttaggagtgtttccacaaacttttctaaatagcgctgatctaattcatcaaaacgatttttttcaggactatcaatgtccagtacaccaatgacagctccttctttcacaatcggtacaacgatttccgaattagaagcactatcgcaagcgatgtgacctgggaattggtgaacgtccgctacaagctgcgttgttttcgtttcagctgctacgccgcaaacgcctcgtccaaatggaatgcgtacgcaagcaggcattccttggaacggtccaaggacaagctgatttccttctgttacgtaaaagccaacccaattaacgcgatctaaaaattggtttaataatgcggacgcatttgataagtttgcgactacgtttgattcgccagttaataacgcatccagttgtttaattactgtctcatattgctgcacgcgagatcctgcataactttctttagtaaacatggaaacagctccttttttatcgagatgtgtaaaatattagcaaaatacgatgtatttcacatgactttgtcgatagaaaattaaaggaatttgtcttaaaagtcaagaaatttaaactatagctgttcattgaagggaagtgagcgcatgaagcagacgaaacaaaaagtaattgatgcggcaatatcgttgtttaatacgaaaggttatgatggaacgtcggtgcgagacattgcaaagcgagcggatgtgaatgtagcgaatatttcatattattttgctgggaagcaaggtttattagaacagcttattactgattttttagaaggatatattcatgtgattgaaatgtcgtttgaacagagagagtatttgtcggctaaagatgtgatggtgcaaatggtgcgagggattttacgatatcaatttgaaaatagagaactaacacgtttcttctaccgagagctttcgcttgatacgacattaattcgtgaagtgatgaccgtttatttttctaaagaaagatattatatagaacaaatgattagacaaggacaaatgaaacaagaatttcagaaagtatcatttacaatgtttatgacgcaattaaaaggtatgataaatatgccgtttttatatccacaatatatatcagaagtactccattctttcccgtctgagacattttttatagagatgtacacgaaagagattgagcaatggatggaacaagcattatgtaaagcgaatatgtaccatgaatggccaagagctgttcatatgtgaagaatccccacctaacgaactgaggtggggatttttatgtttacttttctttgccataaattgttacataatagcgcgataattgttaatgcagctccagcgatttcaattttatcgactgtataacctcgaaagatagaaccaatcagtgcaaggataggaactaaattcataaataatatgccgttaatagatgaaatatagcgatttcccatattccagcaaaatacagcgataacgcctgcgataatcgacatataaaagagttcaaaacgaacgctcacaactgtacgcagtgacggcatagtaactatatttgtgtacgttaagaaagtaacaataacgatgagtgaaatggagccaaataaacaagttaatgtcgtgtacctaagtggtgaccaagattgaaaacgagcacccccgtttgtataaatgacccagcaagtaacgccgcatagcatcaatatatttgttgataagtggcttgcagctccaaatagtaattcaatatttccttttgaaatgacaagcataacaccaagtaatgcaacgaacatacaaaggaatgtatagttttgtgggcggcgatttttcgttatccattgcagtgataaggcaatcagtggcataagggattgaatcatagctgcatggattgctccggaaggtccggcaagttgttgtccgtagaaaacgagaaaaccataccccgcgaaaccgactgtcccgtaaaagaatagagaaagtgttcttttttctaagcggagtgaagtctttccttcagtaattaatagcaaaataagaaaaataatagctgctgatccatagcgaagcgttgtgaagaagaatggatcgataaattgcagagcatttgccattacaggaaacataaatccccaggcagtgacggcgagtaagcatagaaaggatccgagtagcatttgttttttgttcaagagtatctttcccctttacatttcgttatagtaagttgatgaaataagtataaagagtaattgtttataggaggaaatatcgatttcttataacggttataactttttgttagaggtgtgtacgatggatttggaggcagtacgatcgtttattgaagtgaagcatacgcgaagtttatcaaaggcaagtaagattttacatatatctcaaccagcgcttagtaaacaaattcaaaagttagaagcggatttagaggttactttacttaagcgttcggcgcaaggagtagagttaacggaggcaggagagttatttataaaaagaatgttaccgattttggagcaaataaatgaagtgaaaacagaaatgagggggtatcaagagaaccggaagttttcaattggtatactaccgagtttagcggagcattacatatcagaatgtaaagatatattaggtgatgagttcgaagtggaatggcaaatcggtcatacggaagtattaagagatttatttaaagcgcgggagattgacgcgatgttcatcgattcagtagtagaaggtgttacgtatataaaagaagtgcaacaagagaaaattgtttgtgccgtttcaaataatcatccgtacaaagagaaggtagtcattcaaatagaagagctgcacaatgaaaaattaattgtatatccagaaatatgtgatgtaaggaaaatgattatgaacatgtttcatgaaataggtgtaaaaccaactatagctgtggaaacatcttacgcagaaccgatgcttgcaatggtaaaagctggccttggtatcacgttacttccagaaagggcagtagagcagtctgtaaggcaaggaaatgtacatgtaatctctgttgaaccaccactcatgcggaaaatttatttcgtatcccatacgaaagattgtttgttattacaatcatttgaggataggtagtgaggtaggcggaatattgagaaagattacaatcacattgaaaggaacatgaaatttttaaaaaaactaggtcaaaaacaaaccattacatggtatgattagtacattgttagttgttaaatataggggaattccctttttatacataatgccttccatttcataaacggaacggacaaaaaaagagatataactaggaggcttttttgcatggattctatcctgacgatcgttatcattgtagtaagctctattctagtgctgctcatgatagagcttgtgataagaaatcgttcatataaagatattgaagcactggagcagtggaaacaagagataaaagataaacctgtggcagatgaattaaaacgggtaaaagatttaaacatgacgggtcaaacagaagaactgtttggtaaatggcgtgaagaatgggatgaaattgtatcaacaacccttccgaaagctgacaaagatttagcgcaagcgcgaaaattcgcctcgcaattctccttccgaaaagcaaagcatgcgatgaacgaatccataagtggtttagatgacgctgataatcgtattacggacattttaaatgaattacagcaattgttagaaagccatgagaaaaatagctcggaaattgaagggttacgtgatacatatcgtagtatgaaaaagagtgttcttgctcatagacatatgtatggagcagcagagcagaaaatcgaagagatgctagacgctgaatctgagaaatttaaaacctttgaagaagcaacaaacaatggcgactatttaaaagcgagagaaattgttattagtttggaagaaggtttagcagatttagaaatcattattcaccaaattccagatttattggtagagtgccaagcgacgttaccagttcagctggaagatttattacacggacataatgatatggtaagacaaggttatgtattagattatttggaagtccctaaagaagttcgcgatatgacgaaacaactacaaacatgtttaatggatatacaggagcttcatataacagaagcggctgaaaaagtagaaaacttaaaaacacgtttagatggcttctacgatcaattggaacaagaagtacatgcgagacattatgtggagcaaaaaacactttctgtttacgatgacttagaagaaatgcgtatcgaaacgattgaaacgaaaacagaaacacaacttgtgaaacaaagctatcagttacaagataaagacattgagtctcaaaaagtaattgaaaagcaaatgcacattttaacgaaacgttttgaaatgctgcaattacgcgttgcagaacaagatattgccttctctattattcgtgaggaactagaagaggtttatgagcaatgtgaaacgttaaaagtacttcatgcagaatataaagaaatgctgcaagcgatgcgcaaagaagaatttgaagcacgtgagaagttacaagaaatgcgaaatattattttcgaaacgaaacgctttatgcaaaagtcgaatttgccaggtcttccagagagtattatggaagatttaaaaagagggcaaatggcaatgcaagctgtatatgaacaattagaagtgaagccgttaaatatgaacgctgtaaatagcagtttagaagaagcatacacaactgtgaacggtgtagctgaaatgacagaagagttaattggacaagcatatttagtggaaaaattaattcagtacggtaaccgttaccgtagtcatgatgaaaacctagcagaaagtttaaattatgctgagaaattattccgtgaataccaatacgatgcagctttagaacaagcggcttcagtgttagagcaacttgaacctggcgttgttcaaaaaatagctgaatatgtagacaatgaacaaaccctttcataaaagggtttgtttttttatgtaattttgcaggcgatgttgctataatgaatagcggaatacagtaaggttattcgtttcaaaataaagtgaaactgtaatcggtgggaagattcatccccactgattactagccttcaccaatcgggcatttacgggcagttaatctcccatctaacttctttgctctaactggattttgaggtgagagtcttattgcccgttaacgcgggataaagtgaaactgtaataggagggcatcctcgccaattattagccttcaccaatcgagataaaacggaacctttgcgtagtcttagcgtaatgacacgtatttatgatatgattatacgatgtgatagcgctgaaaggggaagaacgatgatctattttgataatagtgcgacgactaagccatatccagaagctcttcaatcgtacgtgacggttgctgggaaatattttggtaatccttcttctattcattcgcttggaggagaggcagagcgtctattaacacaatcaagaacgattgcagcgcagcttcttcgtgttaaaccttctgaaattatttttacatcaggtggaacggaagggaataaccttgcgattaaagggatagcgatgaggaatcgttcgcgtggtaaacatatcattacaacaaatattgaacacgcgtctgtgtttgaagcatataagcaattagaagaactcgggtttgatgtaacatacttaccggttaacgagcatggtgttgtatcggtagaagatgtgaaacgagcgcttcgtgaagatacgattcttgtgtcaattattcatgtgaacaacgaaactggagcaattcagcctgttgctgaaattggaacgttattatcgaatcatccgaaaataagattccatgtagatcatgtacaagggataggaaaagtaccgcttgatttatatgcttctcatattgatctttgctcaatatctggacataaattccacagtgtaaaaggaacaggtcttctttatgtacgcgatggcgtaagattagatccgattttatcaggtggtcaacaagagcttaagtatcgctctggtacagaaaatttacctggcattgtagcgatggtgaaagcacttcgcatgacaatggaacaagtgaaagaaaaggtagctcatttgcaaagtttacaagcagagcttgttcgtttctttaaagagatggaagatgtaacgattaacacgtcgcttgcatatgcagcaccgcacattttaaatgtatcatttgttggtttaaaaccagaagtagtcgttcatgctttagaagaacacggtgtatatgtgtcaacgaaatctgcttgttcttcaaaagcaaatgaagtgagcagagtgttagtgtcaatgggagtgccgcatgcagcagctgcaagcgctattcgtattagtttagcaccagaaaacacaatggaagaagtaaaacaatttgaaggtattgtaaaagagacgatgccaaaattatatgaagtgatgaggtaaagaaattatgttgaaatatgaatatattttagtgcgttacggagaaatgacgacaaaaggtaagaaccgttctaagtttgtaagcacattaaaagataacgtgaagttcaaactgaaaaaattcccaaatattaaaatcgatgcaacacatgatcgtatgtacatccagttaaatggtgaagatcatgaagcagtctctgaaagattgaaagatgtattcggtattcataaatttaacttagcgatgaaagtaccatcagaattagaagacattaaagaaggtgcattagcagctttcttacaagtaaaaggtgatgtgaaaacatttaaaattactgtacaccgttcttataagcatttcccaatgagaacgatggaattattacctgagattggcggacacattctagaaaacacagaagatattacagtagatgttcataatccagatgtaaatgtacgcgtagaaattcgcagtggttatagctacattatgtgtgatgagcgtatgggagctggcggtttaccagttggcgttggcggaaaagtaatggtacttctttctggtggtattgatagcccagtagcagcttacttaacgatgaaacgcggcgtatctgtggaagcagttcacttccatagtccacctttcacaagtgagcgtgcaaaacaaaaagtaatcgatttagcgcaagagttaacgaagtattgtaaacgagtaacgcttcaccttgttccgtttacagaagtgcaaaaaacgattaataaagaaattccatctagctattcaatgacggttatgcgccgtatgatgatgcgtattacagaacgtattgctgaggagcgtaacgcacttgcaattacgactggtgaaagtcttggacaagtagcaagccaaacgttagatagtatgcatacgattaacgaagtaacaaactacccagttattcgtccgcttattacgatggataaattagagattattaaaatctctgaagaaatcggcacgtatgatatttcaattcgtccatatgaagattgctgtactgtatttacaccagcaagcccagcgacgaagccgaaacgtgaaaaagcaaatcgttttgaagcgaaatacgatttcacaccattaatcgatgaagctgtagcgaacaaagaaacaatggtattacaaacggtagaagtagtggcggaagaagaaaaatttgaagaacttttctaaaaccataaattaccatatttaaaacgtgtatgaagtcatgttatttatcacactctatactcacaaggaggtgatataacatgtcacgtagcacaaataaattagcggttcctggtgctgaatcagcattagaccaaatgaaatacgaaatcgctcaagagtttggtgttcaacttggagctgatgcaacagctcgcgctaacggttctgttggtggtgaaatcactaaacgtctagtttcactagctgagcaacaattaggcggttaccaaaaataatcccatatgatggcttagaaagagcgggttctcccgctctttcttttttgtgttgccatttgtcggtaagttgatgtaatttcatttagtaattcgacagaactgaaaaatttgtcaaaagaagagggttcaaaattaacagaaaattctttattatataaaggaggcataaagaaaagggaggatattttatgaagagagaagaattgttggcgccaccgtcttataatttagtttctgaaatagagaaatatacgggtgataaagggaaattagctttaatttggcaagatgataaagggaatcgaagggaagttacatacgctgaattaatgcaaggtgcgaataaaattggaaacgcttttataaaaagtggtttgcaaaaaggggacaagcttctcattatgatgccgcgtttaattgaagcgtacatgacgtatattgctgctattaaagcaggatttgtcgtaattccaagctcggaaatgttacgtaaaaaagatatagaatatcgaattggacatggagaagtaaaagcgatagtaagctatgagccgtatattaggcagtttgatgatatagaagcgatggaatctcttcggaaatttgtcctgagcgagcagtcagtagatggatggattaatttaaaaacagcgttagaaacagagagtgacatgttagaaatggcgaagacagataaagaagatatggtctttttatcttacacgtcaggaacgacaggaaatccaaaaggtgtcgttcatacacatgcttgggcatacgctcatttacgtacgagcgctccaaattggctcggaattgaagagaatgatattgtatgggcaacagctagtccaggctggcaaaagtggatttggagcccgtttttagcaacgctaggatcaggggcaacagggtttgtatatcacggtaagtttgaaccggaaacgtacctaaacttattagacgataataaggtgaatgtactttgttgtacaccgactgagtatagattaatggcaaaggtagaagatttaagtcagtacaatttagaggcattacatagcgctgtatcagcaggtgagccgttaaatagagaagtcattggaacgttccaaaagcactttcatattacagtgagagacggctatgggcaaacggaaaatacattacttgttggtgtaatgaaagggatggatattagaccaggttcaatggggaaaccaacgccaggtaaccacgtcgatatcgtaaatgaggaaggtactccagttaaagtaggcgaagttggtgatattgcagttcacattgaaacgccggccctctttaaacaatattacaaagacgatgaacgtacagcgatgcaattccgcggtgattattatattacaggtgataaagcgaagaaagatgaagacggctacttctggtttgaagggcgcggtgatgatatcattattagctctggttatacaatcgggccgtttgaagtagaggatgcacttgtaaaacatccttacgtaagagaatgtgcagttgtcgcaagtcctgatgaaattcgtggaagtgtcgtgaaggcatttatcgtattaagagagaatatagaaaagaacgaagaaacattaattccaacactccaacaacacgtcaaagaactcactgcaccatataaataccctcgcaaaattgaatttgtagatgaactaccaaaaacgatttctggaaaaattcgccgtattgaacttagaaaacaagagatggagattccgtcaaaataattttgaaaacagtgaagtaaatagttgaatgaaatgcaaaacaatgataatataaaaacgaacacaagttcgattttataaacttaaaaaagaggtgtccgtatgattttaggtattaatccgtacttagttttagatggtagtgggcaagaagctgtacagttttataaagaggctttagatgcaaaagtagaagtcatgcaaacttttggtgacatgcctgaaaatccagaatacccgattccagctgaagcgaaagagcgcgttttacacgctactttaaaagttggtaatacggatcttatgatttctgatacattcccaggtcaaggacatgcaaacggatctcaagtaacaatcgcaattcaaattagtaatgcagaaaaagcaaaagaagtattcgataagttacaagaaggtggagaagttatcatgccacttcaagaaacattctggagcccagcatacggacaagtaaaagataaatttaatattgaatggcaagttacaacgtctactactgaacaaaagtaatttttagaaaagcaccatgttttgaaatggtgctttttttatacaataaaaaataaaggagatgggatatatgggagaaatttggtatggcggcaccatttacacaatgagagaagaaaatgaaaaagtggacgctgtttacgttgaaaacggcataattgttgatgctggtaataagggagaattagaaagcagatattcaaacgtaaagttacatgacctaaaaggaaaaacaatgatcccaggtctcgttgatagccatatgcatcttattgggcatggagagagattactccgtctagatttatcaaattgtacatcttatagcgaagtactgactcttgttcagaagcgagtggaagaagctccaaagggctcttggattattggagaaggatggaatgaaaataactttacagatacgaaagatgttcacgcgcgtgatttagatgaaatttcgaaagaccatcctattttattaaagagagtttgtcgtcacgttacatgggtgaattcatacatactgcaagaagcgaatataacagaagcgacagaagatccaaaaggcgggaaaattggcagagattcatcaaataagttaacaggacttttatatgaacaagggcaagaattaattaaacatgttcagccagaaattgatgaagcttatttacaaagagctctgcaaacagcgattaaagattgctggaaatacggacttgttggcgggcatacggaagatttaaattattatggtggttttagaaaaacgcataatgcgttttctcatgtgataaaagaaatgccatttaaagcccatttgctcgttcaccatgaagtagcacatgaacgaaaagaatatgaaaatgaacattatattgaatttggggcaatgaaaattttttctgacggttcttttggcggaagaacagcattattaagtgaaccgtatgaagatgcgaaggaaacgaatggggttgcgattttctcatgtgaagaacttgcagaattagtgaagaaagcacgagatttacatatgccagttgcgattcatactatcggtgatttatcgcttgaatatgtcattgatgcactcgaattatatccaccagcaaaagggttacgtgaccgcattattcattgtcagcttgctcgtgaggagttaattgaaagaatgaaaaacttgcaagtcattatagatatacagccagtctttctttcatcagattttccgtcagtcattgaaaaactaggagagcgccgtcttcgttatgcgtatgcttggaagacattactggaagcagggctacattgtaatggtggctcagatgcccccattgaacaagtaaatccgtttctaggtatatatagcgctgttacacgtagaagttttattgacggtgtatgctatatgcctgaggaaagattaacggtatatgaggctgtttctttatttacaacaggaagttcctatgcaatcggaaaagaagcgaagcgagggcaaattacaaaaggatatgaagcagactttacaatattagaccgcaatatttttgaaattgaggcagaagaaataaaagaagtagaagcagaaatgaccgtaatagatggccaagttgtctatagaaaaaatgcgtaaaaatatatcagcgattttcggaatatatcgactgtaactcgaaatatataagcgattattgaaatatatctatcgtaactcgaaatatatgagcgattattaaaatatatcgacttaccgacaaaaactgacaagaataacgggtggatagtaagagagtattgtccgcgccaatcggggtaaataaataaccgcagaattatggaattccataattctgcggttattttaatcctataaaaacgttctctgtactttttcccagaaagaattgttttttaatttaactgttttaatttgtttatcgcttaagcgtacaacagctttttccacttgtttaatgctaagcgcttcgttatccatgccgataacaggataatcgttaccgtctggtcttagttttaaagttaatgtacgttcgtgatttaaaatgaaaggtgaaccgagcgtacggtaagtgttgttgtttaaagatgctagttcgcttacttggaaacatggaataagtgggtcaacaactgcgccatgcaatgatttattgtaagcagtacttcctgttggggtagaaactactaaaccgtcacctctaaatgtttcgaaatataaatcatcaacgtgaacatctacaacgaatgtttttataatactagaacgtaatgagaactcatttaaacaatggaaagatgtactgtgatctacatctacctgaattgttggatatttacgcacttcaatttcattttttgtaatttcttgaagggctgtatcaacgtgatcaatatggaaatcacagtagaacgaagtttcatctttcgtagaaatccctgcgtataagcaatcttccctaaaaccagttttacgaacggtttgtaagaaggttgcatcatctccaacactgacgatagcgtttgcattttttggatgatctaatatggtaaatccattctcttctaaaatacgatagattggtttcattttttcaacgagcgttgctttgtcatcaccataaaagaaaaataaattgcgacgatctgccattatgtatccctccactgcagttaaattttctgtttttcgtgctacatatcattagagtccgttccctgatgatatgttcaaataatatatttcgatataaaatgtcaaaacacctttttatttttagaaaaatttttatattcaatcttatagaactctgtttaatgatgaataaagttgtcgataatgggtacggagtgaaaggatgatacgtatgaagtggctcgtaattggaataataattcttcttctttttattttgtttatactattgtcaaaaataaagcttaaggtgacatttttatattcagaaatggaaaagaaatgtttgcttcaagtgaaaatatggatgattcgatatacatttgatgtgttggaaagaattgaaaaacagcagaaaaagacaggacagaaaatcgaaaaagctgaagaggacggcggactcgataataaaattatggcgcaacttgacagcattggtgaactgataaaaaagcttcaagaagttcatactattgttaaagattttctcaaacgagtgaaaatcaatggttggaaatggcatacacaaattggagcaggcgacgcagctagtactggaattgtcactggatatgcatgggggacaaaaggtatggctgctggagttgtcggacaatatatgcatattgtcgacgtaccagaatttgaaattaccccagtttttcaaggaaaaggatttgcatcaagatgtgagttaacagcatcttttcgtatattccgcactataaaaacagcggtgaaattgctcatatttatgaggaagcaaagatctggtatgacagaaaaatctgttcaagcataggggggatatagaatggaacatccaattcaaggtttaatgacaacagcaatgcagcatttaaaacaaatgactgatgtaaatacaattgttggtgacccaattaaagcggcagatggaagtgtaattcttactgtttcgaaagtaagtttcgggtttgctgctggtggaagtgaatttggtaaagtagaacattcaggccgccatccatttggcgggggaagtggtggaggagtttctattaatcctgttgcctttcttgttataaatggagatggtgtgaaagtattgcacttagataaacaaacacatgtcatcgataaaataattgaattagcgccacaagctgttgataaagtgaaagaaatgatggataaacgaaaagaagatgatcctgaatttcaaatttaacgaataaagaagctaatcaataggttagcttctttaatttttttgtaaataaagcgattttatttgcattatcgatagggacaaactatcatttacattgtacatattttgtttaaataagggaggattttcaagtggcaaacgtaacttttaaaggtaatccaatgactttagttggaacagaagttaaagttggcgatcaagcgccaaacttccaagtattagcaaacgacttatctccagtaagtttagaaacatacaaaggcgaagtgaaattaattagtgttgtaccttcaatcgacacaggtgtgtgtgatgcacaaacacgtcgttttaaccaagatgcagcaggtattgaaaacgcgaaagtattaacaattagcgctgatttaccattcgctcaaaaacgctggtgtgcagcaaacggtttagaaaatgttgtaacactttctgaccaccgcgacctttcattcggtgaagcttacggcttagtaatgaaagaacttcgtttacttgctcgtgcagtattcgtagtagatagcaatgacaaagtagtttacgtagaatacgtaagcgaaggtacaagccatccaaactatgaagcagcattagaagcagctaaatctgcgaagtaatgtgaagaaaatgacctcttataaagaggtcgttttttctcatatattgctctgtaacggcatcgatatatgagaaaaaacgttatatcatatataactaaaggggagctctttacaggaggtcgctttttctttttggaaaaaatcactttgtggtatgatataagttatgtgtaaaagagagaaggaggaatgtacgtgagtcagacagtagaaacattattttctatttttgattcttctgcggtagttttacgtaaagaattagatgtaacatatttagaggcgcttgtagaaacaggtgataacttgtttgagggagcgattttacaagaggaattatccgaatcagcaattgaaaggctgaatcgtgaatatagtacgtttaatgaagaaacatataaaggtgaagaaattcgtaaagcatttcagttagccatcttaaaaggaatgaaagaaggcgtacaagcgaatcacgaaatgacacctgatgcagttgggatgttcatgagttacttattccataaatttatgcaaggtcaaaatgaaattacagttttagatcctgcaattggaacaggtaacttaatgactacagtgtttaatagcgctaaagaaggactaacaatgagtggatttggtgtagaagtggatgaagtgctaattaaacttgctttagtaaatgcaaatttacaaaagcatgcaatcgaattcttccatcaagatggactagcaccactttatatcgatccagttgatgcagtcgtttcagacttaccggttggttattatccaaacgaaatcggtgcaagtgaatataaattaaaagcagatgaaggaatgtcgtatgcccatcacttatttattgaacaaagtgtgaaacatacgaaagagggcggttacttattcttcttagtaccaaacttcatttttgaaagtgaccaagcaccgaaattacatgcatttattaaagaaacatgctttattcaagggttattacagcttcctgtttccatgtttaaaaacgagaaaaatgcaaaaagtatatttgttctccaaaagaaaggcgctaatgtaacaatgccaaaacaggcgttattagtggagttgcctaaattctctaatatgaaggcgatggaagacattatggatcaattaaatacttggtttgcaacacataaataaagctaggtatatgtaacagcattagtgatttatgtagtacagttttatataatatgtcatatttttaaatatatacaagatttaactgaatttttttgaaatctgtaatatatattttttcttggtgttacaattttttcacttgaaatatatgtcggacgatgtttaaattaaaatcgtgagtataaaatttgctaatgatgaaacgttttcatatttagtgaatttgatcagataaaatcgagcggtttgtggaaacatccacacaactaccaagagaaaaaggggcgaaagactagatgtcaaaaatcatcgcgattaacgcaggaagctcttccttaaaattccaattatttgaaatgccaagtgaaacagtattaacaaaaggtttagtagaacgtatcggtttagaagatagtatcttcactattactgtagatggcgaaaaacaaaaagaaattacaaacattccagatcacgcagtagcagttaatatgcttcttaaaaagttaactgaaaacggaatcgttaaatctctagatgagattggcggtatcggtcaccgtgttgttcacggcggcgaaaaatttgctgactctgttttaattactgatgaagtattagctgatatcgaagaattaagcgatttagcaccacttcataacccagcaaacgttgttggtattaaagcattccaagaagtattaccaaacgtaccagcagtagcagtattcgatacagcattccaccaaacaatgccggaatctgcattcctatacagcttaccatatgagtactatgaaaaattcggcatccgtaaatacggtttccacggaacttctcataaatatgtaactgagcgtgcggctgaattattaggtcgtccaattgaaagcttaagcttactttcttgtcacttaggtaacggtgcaagtatcgcagcagtagaaggcggtaaatctattgatacttctatgggcttcactccacttgctggtgtaacaatgggtacacgttctggtaaccttgaccctgcgttaattccatacatcatggaaaaaacaggccaaacagtagaagaagtagttaacgtattaaacaagaagagtggtatgttaggtcttactggttactctagtgacctacgtgacatcattgcgaaagaagaagaaggcgaccaccgtgcgaaagtagcacttgatgtattcgtaagccgtatccacaaatacatcggttcttacactgctcgtatgaaaggtgtagacgcaatcatcttcacagctggtgtaggtgaaaacagtgcgattattcgtgagcgcgtattagaaggccttgagtacatgggcgtatacttcgatgcaaaacgtaataacgtattcggtgaagaagcattcatcagcttcccacactctccagtaaaaattatcgtaattccaactgacgaagaagttatgattgctcgtgacgtactacgtcttggagatattggttaatatatgaaaaaaaagacgagatcctataggatttcgtcttttttcttttagatgtattttaaaactccatccggatataatattttttctttctgaatgaatgccgtaataggaatccatttcgcatatgctactgtttcctcatcttgtatatttaatattttcatttcatatagtgacgtgtctaataaacgcaaagaatatagttgaataatttcatgaccaatgtctccatctagatgaaagacattttctaaacagcctaaataattggtgatttccacttctgtatgaagctcttccctaaattcacgaataacggtatgtgctgattgttcaccaagttcaattgaaccaccaagaggtcggtaaaatgtttcatcggctgaatgatattcttgtacgagaagacgcccgtgatgtatagcaatgccaaaagcctttgcacgtggatacatatacaatcactccttatttttttgtataaggaagattataatatgttttgtagtaaaggtgtcatgtatttaagaatgtggtctaatcgtaattccatcaaataagtctttccaaaatgcttcattgtattggtatacatccataataggacatttcataacgcaaacacgttgtaatccccaatcttcttgggtgatagttggtatatcggcaggaattagtaacaggacagagaatgtatgtgtaacgatttgagataaaatttgttctagggaacatgcttcttcatatgttcctccagttcgaataaataatatggattcggccgtttcaattgtagctagaaaacgattaatacgatgttcataatttaacttaatttctgtataagaaggccaagaagttggtgtgtttacatctgttttaaagtcatgacaggagtcaatttcataaaggttgtcccttaatcttaattttgcatcatcatcccaaaatgagatgaaggataaattttcgaaatttaaaaagcggtcaaatcgattttgtaataatacattcactttttctaatgaggggcttagcataaaatcaataacgccaaaaaatggtgataattctaattgatataatgcccaagcaggccagcagttttgtcctaagctgaataccgcattatattctttttttatatcggatagattcatgtgatttatctcatcctttttgttaatattttatgccattcaaaaatggtatgtgaataaagatagacaagcatatttgcaaagaataagcagaaatatgttacaatagaaaaaaatcgaacgaggtggttgttacgatgcgatcgaagcgagaacaagccattttagacaatataaaagaatgggaagcgcaattagttgagcaagaagcgaccgattttcaaaaagtgtttgataaatggttacatactacagttgcgaaattacctgagaaaaagcgaaaagaattcttcacgaaagcagatggatggctctttcatttgcatgcatttattcaaagttcacaagcacagttagatgcacgtaatcggattttaggaacatcaagattatttgatgaatcgattgaacagcttgaagatttgaaagcattatctattgatcaattaacatacatagcagagcagcaaacagcacgtcatcgtctatattcatttgtacaaggcggggcaacaggtgctggaggtttattattattaacggcggattttccggttatgatcgcattaaatgtgaaggcagtccaacttattgcaacatcatttggacatgatgtgaacaagccgtatgaaatgatgcttgcgttaaaggtgtttcatgcgtcattactaccaggaagacttcagcaatacgcatggtacaatttattgcaagagctggagcaagaagattcgttcttctacgaaggagacgaagcagtgctacaaacagcttctactgaggttgtgttaaaacaaattttgaagacattttcgatttatgctcttcgtcgtaaattattccaaggtataccggtaattggaatggcaattggatctacagtgaattatcgtttaacaagaaacgttactgaatttgcaaatagattttatcaagtgcgccatatagtcgagaaagaaaaaagagcataaaaaaagcgagaggccgaagcctttcgcttttttaatttgttgcatgttttttagacattggaacagatactggctgcttttctgctgttttttctgtttttggataataaattaaatccaatgtttttgcctgtacggcaatcgaaagaatagtaaaagcaatttctgtccaatttaaataatataatgaaagcgcaagaacaatcgcgtcaaagacgaagaaaatttgcccaattgtaaaacgagttcgtttacttaatacaattgttaaaatatcgtctccaccggttgcaccgccaaatcgcaatataaaaccgagtccaataccagctaacgcaccgccaactactgcagctataaataagttatttgataaatctaccgtaaatggagaataattttccataaaggaataaaatactccgaatgaaattgaacctaggaatgaatagccaaccatttttctacctaaaaatgaagcacacagtaaaataattgggatatccattaatacagttgaaatagatggtgaaatatcataaaagttttgaatgaatagtgcaattcctacaaagccaccttctgttaagtggttttggaagtgaatgtgatatagcgctgctgctaaaataaatgaaccgattaaaaccataaaaatttctttaataatttgccgactttggatgttcctcatcgttattccttctttccgtagttagtagtcctttttgtgttgtaaactaactacgagctcacatgtagctttcagttagtttacgaaaaaactaactacgctatatgtcgctgaagaaataacgaataatcctctcgtccatcaattctccctaccttcgttttagtttaagtcttaaaacgactaaacaaaacgtggagtaggattcttcatttagcaatcctgctcttctttgttttgtttagttagtaacaattaagtcctaaacaaaacgctatgtgtaagaagagtcttttttttgccaaattatccttcgggcaatcataatttccccactctcgtatttttttcgctagactaaagtatctgagctgaaaaatacgctacgtgtatgattcgtcaatacgatgccacatgctccttcgagcgatcatgatatcaaaatcccttccttcaagatttatactattatatcatacttttaaaaaatgtatgcggatggaaaccgacaataaacggagggaatctacaaaaaatgttatgtttaaatatttttgtagaaaagcctaagttatttcggaggattggacagtttgtaacggtttgtccaataagtaagaaaaaaaggttttattccgttgtattcttttcatcacttttatctttgaaaaacgcatcccaactaatcacacttaaaaaagttaaagcgataataacgaaagcacgcataagctgtagacctccttttgtacatagtatatgaatcattcgattcggaatgtgtcatttttttacaagtcttaactattatgagagtatattaatatagatagatgaaggggagagtgaaggtatgctaaaagaaatgttcaaaagaaaagaattaatatgtatttcatgtcagaaaaaaattcaatatgaagaagagcttgttgcttttgtaaagttgccgaaagaaagaagtatattagttggcccttttgatgtgtgtttggcaaaaacagcacaagagatatattgtaaatcatgttacgacaaaaaaagcatgacccaaagtaattgagggacatgcttttttcattggtgtgctttccccatgcccatcaacttaaggatagaaactctacggttttccattaattgaaatgaacaaacttttaaacagtataatcctcttaaaaatgagcatacgaaataaaccctaacgggtttcatttttttcttatgcagctttcttttgttttctcaatccattatactcatagacaacacccataatatcaaagatagttttcttctcatatcgatgggatttccggccatttttctttagtagggtaaacaggcggattaaaacctttgttattatacgggtgtttctctgtatcgcttgatataacagggatagatgatcttgaatcatcccaattgctttatattcgcttagttctcttttgtgcttttgcaacagaagttggcgcatcttaaacatcgtggaagaacatataaaaatggcaatgagttttccatacacatggcattctaatcgctcttgtttgatagtttgccaatgatgaatttgaaatagagatttccacgttttaaatatgatttcgatctgccagcggagggagtaaaaatcatggatttgttccatcggaaccacttcgattttgtacatgcttaaacaagcgaaaatgtacatgtttatcttgacatttacacaccgtctactaaacgtttattgagatgtaaatagattgtaaaagcttccttatcatattcccaagttccttcaatataattctttttatttggatactcacctttaccatacgtttcaaatgtcttatcaccttttaaaatgagtgacatattgaaaccgtctgttccttggaatccccaattaccgattaattccgtaccatccttcacattcttcataacgttatctgtattaattccagctttcttatctaactctttcaaatctttcattgatactgtaccgtcaccgattttaatatccccttcaagatctttgaatgccttaagccagtaaatatctccttctttcactagcttttcagatttctctattaactctttatcagtcttatcacctttttctcttttttcttttctggtgaatacttcatttattaaagaaaaagactctctaaaataactaattgctttttcaaaatctttttgttggtttacatactctgtagggggatctattgactcaaatttatctaacactttatttaattctttcacactatctactatatctgatttctttttcttaccgtcaaaaacctctcttgtaatattgttatgctccgcaaacaacttatcaaactctactcctaatttatacactttattaggatagtcttcctttgaaacgttttctttcttactattagacttcgattcttttactttagactcttccgttttctcctgtttagaagtgttcgttttctcagaaactccacaaccaaataacaacatgaccggaactgctacccctagtagtttctttgcattcatgactaatttctccttctacttgaatagattactcttactatacccatcctctttttttatcttgtaattaaagttacaatcgcaataactcctaaaattggtccccaatattccatttttataaaaaatagcgagtgttttttgttaaacataactttttcaccagtttcggtatctatataaactttcccatctggcttattaatatatttacctaaataccaagacataacccctgatataataaacattaccgccattggccaactatggtcttgaaaatatgtagcgtcccccgttatagatccaaagatagccttacccaaaagagtattaataattacaataattgcgactaaaaaaccccaaccagaccaaataatcatctatttctcctcctaaagcgtacaactttgtactttatgttaatttgaactgcaaacgaaaatgtttaaaaaaccgaatattcagacgttaataattatatttagcttacattcgattctaactttaatgtcctaaatgcaaatgaaccagatataatttgtaaaattgtcggaataagtaaaaagaataatgacataaacaacataactataggaatcacaatcatacaaactccataaactttattattaaccttgtttactaaacacgataaaatgaacaaccctatttgaaccgttaaaataatagagtaataagctaaaagttcgtaatcaaccccttccataatattaaacgctacaactattaatattatggaaataataattcccaaaatgccaccaattaaacctaatacgaattcaggtgttcttttcaattcaatcccccttttatgaaccactaacaacttgtatatttttcccattcaccatcataccaaatattcactggaaaaactatacatacttttcattcttccttaccttacagtgaccttcttaccattatagatagcttgtagcagtcacaaaatcaaaaccttcaaaattactaaccggtttcgatacttttagaaagtagacataccccttgaatacaattagtattaacacatgaaatacgaaaggcttaaaaaggctttcacatgaagaaaggaagttgcacaactatggattttaaaacagttatgcaagaacttgaatctctaggtaaggaacgaacgaaaaaaatatacatatctaacggtgcgcatgagccagtattcggagtagctacaggtgctatgaaaccaatcgctaaaaaaataaaattaaatcaagagttagctgaagagctttatgccacaggtaactacgatgctatgtactttgcaggtattattgccgatccaaaagctatgagtaagtctgattttgatcgctggatagacggggcatatttttatatgctatctgattatgtagtggcagtaactttatcggagtcaaatattgcacaagatgttgctgataaatggattgcaagtggggacgagcttaaaatgtctgccggatggagttgctactgttggcttttaggaaatcgcaaagacaatgaattttccgaaagtaaaatttccgatatgcttgaaatggtgaaagatacaattcatcattctccagaacgaacaaaatccgctatgaataatttcctaaacaccgtggcaatatcatatgtaccactacatgaaaaagcagtcgagattgcaaaagaagttggtatagttgaagtcaaacgtgataataaaaaaagcagtttgttaaatgcttctgaaagtattcagaaagaacttgatagaggaagacttggtttcaagcgtaagtatgtaaggtgttaaaagtatgaaggtgtcaatgtaggagagattgacaccttttttgtggacattactagactaacggagctgcaagttaaagggaaccaatcattcatctcccactatacatctcaaacttcttctttcaatttatataccctatctcttttctcatcatctttgataaaaataagttttccttctgtaacaaaaccttctaatagtaaacatacttgtccatatgctttaggcttattcgtagtgaatctttcatcggctattttaccagatcgtattaatcgttcacatagctcaagcgcacttatttcttcagaatcaattaattctaaaatatctttttgtaatggtgataaaggggctggtaccttacatacctcagctacctccaccttttctttttcttcttcaaataaatcttcaaatgaaatttgattcattacacctgttcctttctaacaattgatttatataacatgaattgaattctataggtacgaaaactttaaatattagtcattgttatgtagtgcttacctcgttacatgaatttcaaactcatgtacatcatttcatatagtatattttgattataccaaatatacgttctgtcttctattgtagaatttttataacagaaatgaaagtaatagtgaacatttttcttctctttagttgtatagaaaactatgtaaaaagtttacataataaaattatagtgatctgttaaatttctacgcaaaaaagcacttgttgcctttaattgacaatcaagtgctttcagttcatatgtttttttagtagcataaattttgtaggtcttcgcttgattttatattacatctttctataaaaaactgcagtccaattatatctaacacttgggctacacttcatatcagacattttttcatataaatgttcttagtatattatttttgtaactttaaactagcaattaactcatctaaactatccgaaatctcttcaaatgaacctcgttcaaaatcctccaattcaaccttaccacttacattatctaaaacaactatcaaaccgttcccctctacacctattggagtcttatcaaccttattatgattgtttttatacccttctaaattactttcgaaggaatccaattcaatatttggtaatacaggttctagcctaatataatgattaccaataaatccatctaaatcagcaaaccaataagaattaaaataatcatcaattgaagtgtgcagtttaatttcaaatctttcctcaatcttcgttaaatcattcttattatttttttcaataggtttccatgaaatttcttcttcatcatccatttcaccctgatatataaatgaatcaacttcttcgttatatggcgttttaaataaaaaatctaaccctttatcaaaatattcttttcttaaattaaaatatttgctcatagcatccttcattaccaaaataatcacccttacttttctaagaatttttctaatagttcagcatatttttggtcatttccccaaactcctgcgcttttctcagcattatgaatccctcctaaacctggatgtagctttgagggtacagccacagcttgacctccaccaccaatgtgatgatgtattaaagtgtcattatataattcttttaaatcatattggggaaaatgttttctaaacgttggattgtttataggtgcgaatcctaattctattttttgtctatttgacctattaaacgcttctgggtacttctctaacatctctttccaataaaaatctttatcgcgtaaccaaccctctgcattggtgtttttttgccctttaccaacatagggcatctcaacagttaagcgaggatccgcagtatatttagcctctagcttacctaaatcagcaccacgatatgttctaataggatcattaatatcacctatcttcttaaccgtttcacccgtacccttactagcaagagaagcctctacacccttaatctcatcatctataatcttattacttgctgtatgatgcttattcacccagctttgtttagacgttattaaaccttagtcgccactttcaaaacttttcgatttggctgtcatatcatctatgctttttgctgtttttttccaatcttatccccttatgaattctggatttctctatacttagcaaatttgcaatagcataggtagtagtttattgaacctctctgttaaataaccgttctattctaaaataaaaaggggtatctcataagcaagtgaaacccgccacttataagatagccctttaattttaacgctctattaatcatgtaatttacttaagaactctgtgaatgtattagcaacaaaaaatacattttctcttgcgattttctctgcttcttctgccgtaatcccttcactttccatcagcgcttccttttcccatgcatcttcatgttcccaaaaaacaacaattggattttcttcatgatttttataatcaaagcaaattaaatttcctgctggatcaattccaaaaggaattacatctctaggtaaggtagcacggtagttattataatctcttacaatataatcactactctcctcatcaaaagaaagtaatgcaccaaaaactctttctattccttcaacatcaaaacaatatggtattacattagccccatgatttacctttgcacactcgatataatcttttggaaactcaactcccagtgattgacctattttctccacaaattcttccgtaaccgaatcatccgcatacttccattctaaattcttcatctaattccgcctccccataatctatttccacctaaatgattcacactatgaacttcttttattactaattgcattttccccggtatttgatgatgatgccatattaatccatctattctaggcaaaccatcatttatttgagctaactgctttttagtgaataattcttttgagatttcgcctttctcaattgcttcttttaccaatttagtacattccctaaattgatctgtatctttcataacatagaaatctttctctaactttaaagaaaacttaacatcatcccctttaaatattgggaatcctaaaatatcaaaatctactccttttttcacatgtgttcctcctgctaaaggcttatttaatatattatttttcgttttagtattcaaatatgtttctgttagttctacaacttctttaaactcttcaacactatcatacccaaattctttgatggtagtatcatctacttgttttaagaaatcttcaacactatcatatcccttaggaacaattgatctattaatcaagtttccgtctttatcgtaattatttttaattacttcgtcaatttcagatctatgaacagcgttacccgtacccttaaccccaccactctccaaattcgagatcctactctgaatactcgctttttaggcatcatgggcttcttggaatttcccgctatagttcgttccagttctaacgacacttccatctggcagtatttctacacctttaacgaatggggttacggagtccgcaccttttgctagtttaatttcaattatataatactaggaatttatgttagccttaattcataaaaaattacttcttataaatttaatccaagtttctcgttaccacatttctatattataacattaactcaatcgtatcttttaaagcttcatttacattaatagccttttaaataaaaaaactgaaagaggattaatccaccttccagtttcttctttcattattctatcggccccataaattgagtaattaaataaacatgctcgataagtttgactttttgtaagttttctactttttctggtccacctagtgcaagtaaaggtgtgtaaccaaaacattcatctatttcaagctttccgtatttatttaatgcctgctgataatgcttccaatccaatactttctctaaaaaataatcatctttcgtatttttaaagaaaaacttgaattttccagctactacatctaccgtaccttttcgatacttaagtaataataaatagttattttcccacacaagaatatctcccatacctgttgtaaaaattgggatagcttcttcataacggatataactttcctttaatatatctaaatatttttctgggtttattgctcttaagtatccatttaacatactcccaaacccatagcatttccataaatctattatttgatctggaactttccctgtatacttttcaataacctctgttgatggtttttcgaaagatataaaatcatttatattttccatagtatccccctactccgatttcaatctaacattaagatatgtcaattttttttcttcctctgataaggtgtcagcaactcgtctaatttccttatccacattaccaatcctgcttttccactgcgaacctattgatgaattaattctagaatcacccatgccagttatttttaatggatttccacccgcaatttgatctgggtcatgtaatgcagctttatcctttatccgctttaaagcttgctcttctgcttccctaaatgaaaaaccttcttccataaattcatcaattttatcttgcacagcttgttttcgtgttaatctttgagctgaatttgcttgttttgatctcccatattttaaaaattggttccgattctaaataaactcataaactgtcaattttcccagtccatcttcttggttttttaattgtcgtataaactcatcttcattatgtttccgattacgtttaaattcgattccaatttcgtcagtacgcgagctattattacccactccgctagttttattacttccttctaatttactatgcccatgagcaagttgataagcgtcatccttagttaccgtacttgcctttgaaaactttccagttacttctccaacagttgaaggaagcttcactcctattccagtatccaccatcctaaccgttactggaataggagtatttttcatagcatctagtgcattctttaaagtcttattttccctaggcgattgtaccacattatttctacgctaaaacacaaaaaagcacttgttgcctcaaatagacaatcaagtgctttaagtttcatctgtttttaagcagcataaatttgtaagttttgtagtaacagtatgacaccgtttatatgtggtaacaagtactaagttaaaacttacgagtttgtacgagttcgttagtttaactactttctttcgttgaactactaaaagaaaatttctattttcaataaaactacattctcgaactgtaatcaattgtaaatacctttttatcatctgatccttgaattcaaataaaaagtttttaatagaaataaaaaagcgcttgttgtctttcgtagacaatcaagtgctttaagtttcatctgtttttaagcagcataaatttgtaagttttgtagtaacagtatgaaactttttatacttcataacaaatactctctaaaaacttacgagtttgtacgagttcgttaatttaatatacattccatgcgtttatattcatcccacagtaaaatgtcatctcgcctaagctcgtacttctttttctattctatccttgcacgtaatactctatttaaagcagttacataaaaaccttgataagtattcaacttatcaaggttttagctctataacttataattttcccatagtttttttctcattatatgtgtctctaaatctgctaatctaacaggtatgggtaaccgactttctttattaataagcctcatgacaatttcagtacttgtctctaaatcaatccagttaccacatgaaataaaaatgggttttacacttttggttgttcttaaagctcgaccatatatttcattattaatgataatatccgtatacgatccctcttgattttcaggcatagtaaaatctacacctttaatctttaaataacttttcgctacaccaattgttggtttatttaaatagaaagaagcatgtgttgcaatacccatgtgtcgataatgcaaataaccattcccatcaaacatatagatatctggttgcttagttagtttttttgctgcagctttaattaaaggcaactcacgaaaagcaagaaaacctgaaatatacggaattgttatttctccataactgtacactttttcaacaacttcatgtgtactaaaatcaatgactacaatacagcatgtaccatacgttttaccatttaattcccaatacgctaaatctactcctgcaacaaatcgtatttcttctaattcaaaggtatttctaagttgtacttttggtaagaatgcacgctgctcatttttaaattcctctattaaaggttttaatttagaattatccattgcaatcacagcgtaaatttttttcaataaatagtaaattctctttggctgattcaagattttgtttttttatatattcttgttgatcccactcagcgcaacataaacatatcgccgcatttaaatttctcttcatatttccctctccactttcataccaaatttagtgcatacctcctgtatgtcttctaaccatacttcatttaatgaattacaactcaacatttcaactgattttgtatagtatttactttattatacttttggctccctactgaattttttagcatataataaatctgattcacttggttctgttttttgttctataatattcccttgttcatcatactttttaaaagtcatctcacgtccggcaatacattcagactcatactttttagccctgttttcaaagaattcaacctggtagccttctgccgagtttttattcatatttcctatcctttttatattaccactcggataaaattccacatattttccttgtttaacaccattttctacgtagaaataactttctatattcccattttcataaatatcgtaagctaatccagtaaataatttttcttttccatcatcagtatactctactattcctaaatcataaggccctccgtattctaagtactcctcaaactctaggccgttctgtattatatattccttcgttaatatatcatttaacattttttgaaacctccgtgattatttcaaattcatctgtaagataagcacaatgaggacaccttagaaacatcattccagctggttttgttctattttgacccgtacgaattacattgataacaaaattatccaaaccagcacttggattagcctttaatgctttattcaaggcaattacttcagcgtgtgaacctgcaccttttgtaaatgtatatgaatcaataacttcttgtggcatagaatcatatcttgactttattaaaggatggaaatcgggcaatattccatcgtagtcatttatcgcataataaattttaccagttgttttatcatacactccagcaaaggctggaccaatttttttcttacttatccccgtatcctttaacttttgcaattccttaagtgtttcgccgcgtaagttaatcctataattcaattctttcgaagtaaattttccatatttattacgtaaataatctattcgactattacccgtacccttagctacactaccttccttactaactcctgaaccaccactacccttagcaagttgataagcgtcatccttagctgccgtacttacctttgaaaactttccagctacttctccaacagttgaagattctatataaggaagcctcattcctattccagtatccaccatcctaactgctactggaataggagtatttttcatagcatctagtgcattttttaaagtcttattttccttaagcgattgtaccacatttccacccaaatttggattaaaaccaggcattccttctttgaattttaataatttggctaaatcagctaattcactcgtccctttgaatgcttttactccttttcctactgctccaacaactgggattgcatctaatccgccaaaaatgatgtttcctacccgctcttcttggctcaatttcctatgtgttccccagtcttctccgtcgataccgctttttatttgtacacctccgtatactactgcggcagcggccccgagtggtggacaaaggattgttgtgatgatgattcctactcctattcctatgtctcgcaccatttctagttttttctgttcatcttctatcgatttgtattcaaatcctcgtgtggatgggactactttcttgtattcttcataatttaattttgcatctggattttgtttttttagttctttgtattctgccctaagtacgttatcaaatgcaggtgaatctctaaaaatatcttctactgttattttatctttcttcttctgtattgtttgtggtacacttccgtagcctgcatgcgcacctggtaatactgtcgttgttgtagagccaattcggttatttgtttcaaaactgagaatagatgtatctctcattttttgagcgaatttatccatttctactaaaaaaggtttatctatatgttcagatactaatcgccctgcttctccgcaatatttttgtaatgtcgaatagctatcaagtaattccccgattttttgcgattgatctttaggattaaaatgtatactaccatccgagtctaaatctcgtattcttccatcaattctttttaatgattcatttgcttcccgtaattttatgagtgcatcttttgtaattcgattcataccatcccccatgttttgccatggttcaggtctatatttcacatccatctcgttttcatccccccagccgtatggtgatttctacaacttacttaatatttcacgtaattgttcgtccttttcaagcatttctacacatacatttcctacaactgtcgctgacctagaatagtgttcagccaattctagtgttttgtgtaatatatcaggatatttttcaattactctcatcgcttcacctttttgataaaaattacagcttaataaactctcaatattcgttccaatgacgtctacatggattttatatatattttctaacttcattactatatcaagtagttcttgaaaattaactaatacttcttctccaccaccagaaccactatctcccattgatacttgcattattgaatacctcctaacgagaattgtctcgggtcaattaactttttatatggcatttttaacacgtcatacaatttcttattaaccgcatagaggctcacccagtcatatcgattacgatctacatctatttgaacgaaatcttctccttcagtaaaatataagaaacattcccattttcctcctctattacttcgaggcctcgtatacgtttctatcgctataacgtctttatttgataaatctttttcctcaaatgtttgttgttctgcctctgtcattctctttgagaaaaatgtatcttctatttccctcggttctctcaataagaaaggaatgcgtgttaataatgaaaaatatacgtccggttttggtatgtagtcgatctcgtattttttatttggttctatttctgttaatacagccactcggtctttatcctcttttaaaaagccaattaatacattattcattctcgtgtattcatgacaattttcatattcctttaatagttcaattatttgaaaagctgcaggggtaattccattttcacttgtaagtaggcctttttcttttaaactcgtagttgctttcgtgacacattctgcatcaagtaaaataattgcgtcacggtttggcaatccaaatatatcggtaaccccagctgcacctgcgagaacatataattcagcaggtgcaaaactcatttctttccccattcttttatccctcgtttctccatcacagttgttttatctcccttacttccgatttatctccgtacgtttgaatgcttttatctaactctttcaaagctttcgtatgtccttcaaatgcctctaccatttctgaattatattgaatgatcaaatcaagataacttaaaaatgcatctctcgtttttccattccatttcgcacctgtgacatatgcttttaagtctttcgcttggtttaaagaatccttcataccattttcaatgttttgtgcgtaagaaatggcacttgcagtgttacttcctataatttcaacctctttaccactcatgttggttccctccattctttgtatggttaatggataagtttttcaaattcctttttcttttcttcaaaagccttggtcgctgcagcgtatgctgacgctttctccgattctgctttcgctttatattccaaatactttgcataagctgtactttttgcagatccaacatcgcttaatgcacttttaaaataggatactaatgtatgtaattcttcatccttttcatgacgtttttgttcaaattcaactgccggaattttattagcttctaaaccattacttttactctcataatctctcttcgctgattcagcatcttgaatgaattgctttaactctctttctttatcttttaaataatcatgtaaatcatcataccgatctcgtttcctcgcactttctgtaaaaccagacgcatttaaaaaagcattgtacaattcatctaacatctttctccccctttagcacaataactatgtagttaaattcgtatatttaaacatgaatattcattacattaagaattaacaaataattatttttacatattgctattttatcaaagggattttaacatttccatattttatgaatggctttcgcatttttcttcaataaagtgaaactttaatcaatatgactatgtatttatgtgcagaaataataaaaaacactgccaagcgcagtgttttttattattaccttttatccaattcattcgtattaaatccttgcttgagagtaagaccagttctttcttatttcataaacaactatttctggataatcccaatgaagcgtacgagtaggctcccggactcgttttactattccttgggctgttttatttctatattcattccaatattttggctcagtcgctcttaaaagaacaatagaaaaaggatctgatatgaatatcagatccttaactttaatttcttaatacatacatctttttacacgataactggttcatacgtgctcaaattatcatactcagtttttacaatactaggcggaaggttaacacatcctcagattcaccttttcttgtagcagtgcataatgtttaataaaattaaagcatatttttacttaccagacttaattttttcgttatattcttctaaagttaaccctttttcttttagataaacagcaacttctttccctacataacgatagtgccatggctcatacttaatgccagtaatattctctttatcttttggatagcggagagtaaatccatattctgcagcgttcttatctaaccatttgaatgcatcggtagtttcaaattttgcatttaaatcttctacagtattttgccattcaactgaaataatgtctaacgctaatccagtatgatgttcacttgcaccaggatactgaagatattccaatgccttagcactagcctctttatccgacaagccttgagatttatagcttttaactgaagcatcataataagtttgttgtaattttatagctcgataacctgatcttaaataaagattgattccctctttttttgcagctgctaccatatcctgataggaagttgcaattctactatctattttcatatttggcttcgcattttgagtgatacttgttaattcaattcctagttcctttgataacatatgctctctatttacaaggataattctccaatcattaacatcagagataggtaaaacatcttttttcttcgcatgtatttcatttttatttttatcgttattattagtagttgcctgagatgtttgctttccactacaagcagcaagactccaccccattgctaataccaatgctaaaattataaattttttaattgtatctcattccctttttgtttattagtctttataccaatttcccaacacgtctctaggaatctccttgaaatccttcaaagaaacgggaccgacaaattttttaattccatgttttttagaattttcatccgaataatcttttaaaaattgaattttaaattgtttcttaccatcggcatagtcggttactgtcggtacgattgccgcttgtcgtataccaaaagttttatcttcatacttaacaaattgtacataagataatcctccaactaatgtttctaatttttcttgcgcagaaataagatttccaagagaataatagattagcgtttcatgtccatctttattttgtttccactcaattggttgaattacatgtggatgatttccaattactacatctacacctaaatctgttaaatattgagcaacttctttttgttgctttgaaggtgttgaggtatattctactccccaatgcaccataacaatcaccatatcagagctactctttgccttttccacatcattttgtatcgcttttttatcaattaaatttaaagcccaagacttatcagctggaattttaattccattcgtaccatatgtataatttagtaacgcaaaacgaataccattttttgtaatcgtttttatttcattacgctcgtttttactctcattaatacctaccgggataacatccggatatttcttccagtattctcttgtattcgcaacacctttaatacccatatccatagcgtgatttgtcgcttgcgtcactatattgaatccagtgtccactaaagattggcctacttcttcaggtgtattgaaagtcggatatccctgtacttttaaattatttccggcaatcggagtctcctggttcactatagcaagatcacttgatttaacagcttttttgatattttcataaatataattataatcatatgaaccgtctttttgtttgccatctttaattactgcgtcatgatataaattatcacccgtagctattaaattcacaaccgattgtacttttttatcttccgtaaaattaggagactgttggataggacttttctctacccaatttggtgcttttaatgatgtatctatattggattcagccggtggtaatgaagctttagacgtcttaacatctgtattaccacaagcggttaaaagcactaaaaaaataagacatactaaaaaaaactttttacttctctgtaaagtatctaacatgtgatcctcttttctgttttattccttataaccagttctaacaaatcattctttaaaacaacgtattttggttttacccttaattatggaaggacactctgttacacctgcttcggaatatactaataattgttttccgctttctagcaatctatcgattccatcagaagtgataggttactagaaaaagatgatccatcaggatgtcgactagtttgatatacctattccaattgcaataactcgtttaatatttaaacaagataggagaatcgttcatatagcctcttctctcgctttatgtttaaagtgcctccaaaaaagggatcgttgctgtacccctttacatagtacgaaatttttgtaactaatttctttcattcaagcgacaaacattataccgataacaataagtaagacccaagaacttattttaccaatatacgaaaaaagtagcaatcttttgtcccatataaagaagcccattaggagaaatgaacgagagattcattctattcaattcctgcattgattaataaaaaaacaagccacccaactattggatggctctatactataaagagaatttgttattggattacttcaatttcccttcaaaaacaatcttcctaccgcacggttcaactactgttttgccgtctttttttacttcatgaaagattggctcttccatacgacgagacggagcgtagccttcttgttccatacgtgctaagcagtctgtaattgtttcattttcaagtacttcaaatttctttttattaggttgttttgtcatgccctaacctactttctatttttcttgatgcaaattgatttttcatgtagaccatatataacattgcgagaattcccattataatcataaccgcaataaaaaagcttgtatactgtattttttctataaatacgccgcctaatacaggtcccataatacttcctaaactaaaagcgattccggataatatattacctgccggtagtaaatgtctcggtaataaatcagtcataaatccaagccctaaagagaagcacgatccaataaccatacccgctaaaagcatgcaggcaaagacgatccagtaatattgatcaaatacggcggcaagtagaaaaatgcccgtacttatgctaaacgtccacgttaatatacggtcccttccgtatttatcactcaatataccgagcggaatttgtgtaataatacccccaactgcaaatgctggtaataagaaggatacatctgaaacagaccaccctttacgaagtgcgtatactggtaagttactgtttaacattgcttcaagtacgccatatgcaagtggtcctagcagtgcaatccatcctaatccaacaacttgtttataacgagaaaatgatgattcactcttcacttctctttcatcttgcgctgggaatgcattttttgttggaagtagtaaaagccaacctattaaacaaagtaaagtagatataataaatggcgttgcaagaccgtactgcacagtgcttgctaaatacgggccaacggcaaaaccaattccgaagaatacaccgtatatcgatacttgtctccctattttacttgggtctgatgttgtcgtgatccacgtttgtgttccgacatgaagcatatgatctccgactccaactagaaatctaaggataaaccatacccaaaacgaaaatgtttgtgtaaaaaagaataatgaaataataacgagaaacccacctataacaataatcggcttcattccaaacctttgcatcggtttttcaagaaacggcgaaatgactaatatcccaatgtacaatgccgtcgcatgaataccattaatacttgaactaaccccttcttgttcaaaaatcattgcaatggccggtaagagcattccttgtgataaacccgagattgctacaatcccaaccataatccaaaaagtaaaacgcattgacatccctttccctctccttctcacgcttccacttttcattataaactgtttctgcaaatgcgtgtacgaatattcgcaataaaaaacaagctaaaagaatgaatcttttagcttgttaccttatccttcccaaacttgtgctttcacattgttatgaaattgcttaaagtatggatgtttataaaaagcagtttcatataagtattgctgtgcgttagcgattggtggctgcggatattgcatttgtaaaggaactacagctggcgaaacttgcatatacagcggttttatcatcatttttgtatatgcgtaatgattatatggcgaataagcgatgaaaaatggttgatgcattgataatctcccctttaacatacaaatgttatagtatatgcaatactgttcatttcggggattatttctgttctaaccaattctctacatgttttataaatacatctaaacaatcaataaacggcgagtgtccgcaatcttctaataccttcaactctgcattttgcaaatgtttcgctaattcctcaccgactacttgcggaacgacataatctctatcgccttgtatgacgagtgttggcgctttaatacgatgaatttgcttacttccctctacaaccccattatattcatctgaaatattaaatgtaatgagcgcataattcacatctacgaaattacgttgcgttaacatatcatctaaatacttttcataacggtccggttcaggttggttatgcgtatatattaatagattccatactgtacggtaatatagtttgttcatattttttatcgcgtctaatactggagcgatttgtactggatcttgtgcaatttcttctttcgtctttactaaacttgatacaatcggctgcccattcgtatcttttttaaagattgggtaacctttcattcctactgattctactaaaattaacttttctacaaaagttgggtggttcgctgtaaattgcatcgcaacgccaccgcccattgaccagcccattaatgagaatttctctagctttaactcgtcgataaataattttacatcttctgcaaagtcttgtaatgaatctatcgattgattatacgttgattgtccaaaccctcttaaatcaagagcgtaaatatggtattgatcttgcaacttttcaataactaaatcccaatgttgtgacgatgtcatgttcccgtgaatgagtacaagaatatctgtatttcgccttccaacttcctgatatgcaatcgtttctccgttcgatagtgaaacaaactccattgttgcaggcttaatcatcacaagttcccccattctatttaatagaaagaaaattctttacttaattaaagaatagcacgtagaatgtacgttcgcaacataaaacctataagaattttttacataaatcaacatgtctattactagacaattattataaaaaagtatatagttagctaggtaactaatttgaaaggatcaaaatacatggacgaaaaacaacatttttttcacatcgtcagccagacttctcgaaagtttacgaagaaatttaatgaacgtgtatctccaacagggttatttagtgcgcaatgggctgttattttccgcattaatcaaactggttcttgtacgcaaacagaattgtgccagtatttaaatgttgaatcaccaacgatgactcgtacgttaacacgtatggaaacgatgggatggattattcgtacagaaggtaaagatcgccgtgagaagctcatttctttatccgaaacagcgataaagatgattccaatatggcaagaagaagttgatactttcgaagaaaaaacgctagaaggtattaacgaagatgatttacatcaagcatttcaagtgttacaacaaattattaaaaatttagattaaattggagggatgacgatgcaaagtgagaaactttggacgaaggatttcctcggaacttgttttagtagtctatttctcttcttaacattttacatgcttatgactactctacctgtctatgtaatagacggcctaaaaggaaaacctgaggaaattggtttagttgcaactgtgtttcttatttcttctgttttatgtagaccattcacaggaaaatggctcgatgatttaggaagaaagaaaatattatttatttcactttcattatttttagccgctactgttatgtatttcggtgcgcaaagtttattcttattacttgcccttcgcttcttacacggtattgggttcgggatggcaacgacagctactggtacgatcgtaactgatgttgcgccagctcatcgacgaggcgaagcacttgcatatttcggcgtatttatgagtctgccgatggtaattggtccttttttaggtttaacaattatttctcatttttcgtttactgtgttatttatcgtttgttccgtattttcattacttgcatttttattaggactacttgtagatattccacacgaagcacctgttagcaaacaaaaacgtgaaaaaatgaaatggaaagacttaatcgaaccatcttctattccaattgcacttacaggatttgttttagccttttcttatagtggtattttatcctttattcctatttatgcgaaagaactcggtttaagtgaaattgcaagttacttctttattttatacgcacttgttgttgtcatttctcgtccatttacaggaaagatttttgatcgcttcggtgaaaatgtactcgtttaccctgctatcattattttcacaatcggaatgttcatattaagccaagcacaaacttcattttggttccttggcgcaggtatgctaatcggtttaggttacggaacattaattccgagtttccaaacgattgcgatttctgccgctccaaaccatagacgtggttctgcgacagctacgtatttctcattctttgatagtggtattggctttggttctttcattttaggtattgtcgcagcgaaatccagttatcataatatgtattttatcgcagctattatcgttgcgttcactttacttttatattatggattacacggacgaaaacaaaaattcaagaaacaacctacagacggaaaaatttccgcttaacgttaataaggaaagtaaacttccccgtttactttccttattttgtatttctttcaagacgagcgtatacttatagtagaaataaaaaggagggccatatatgaaactaaaaaaatctcccctactcttacttatactaacattcatatttgtaattacagggcttgggtttacttacttcaaacaaaataaaacgaccccatcaaaacataatgtgacaaaagaaaactggttaaatgacccttacttacgttggtcatatacccatatgaaagaattcactttagttaataacgtaaaaaacaatcctgaccaaattgctcacttcccttccgcattgcaaaacttagacgattttgctgtggagcgtagattcggaaatacaactcctctaaaaaaacttttagacgataacaaaacagatgcttttgtcgttgtacataatggacaacttgtttatgaacgatatttcaatgggtataaacagaatgaacctcatggtatggcatcattagcaaaagtctttaccggggcgattatacaatctctcgctgaagaaaaacgtattgacttagaaaaaacagctgacacttacataaaagaattaaaaaacacaccgttcggtaatgccacacttcagcaattaatggacatgcaagtgtcagctgaatatcctactcatggatatgagcagcctgggctagaaaatcaagatgcacaattatatttagctagcaatattttaccccgcggcaaaaattacgacggtccgatgaaaatttatgatatgttacgagaagccgaagaaactgcaccgcctggttcttccttttcttacaataacggatcaacagaaacgctcgcttggattattagaactattactggtaaatcactagctgaaaatgtaagtgaacgaatttggtctcaaattggtatggaagaaaacgcgtattacgttacagatgaaacaaaagtagaacaagctagtgctggattaaatgcaactgctagagatatggcgagattcgggcaattactattaaacaacggggaatataacggaaaacaaattctcccttcttctattacagaaagtgtaaaaaatgtacaagaaggtgaacttgaaattagtagtggcgcttctatttcttatcataatcaatggtggattccccacaatgaacaaggtgctttcgaagtgttaggtagttacggacaaacactttacatcgatccgaaagcaaatatggtaatcgcccacttctcttctaacgcaacgccaagtaatgaaatacattcggtttattcaaatatgtatattgatattgcacattatttagaaaagcttccacagtagtggaagctttttcttgttgggacattttatttatactcctacatattagaagatactgaaagaataactgcttaaaacacgcctatcaaaatttatataagcagtttacatgtttaattaagtgtttaactaatacatccacaccttttggagaattcgttaaaacacttcccttacaaagattgtctgttcatattggtcgaaaatttcttctatagatgaaaataaagtttcttccgggatgatgaactttattttttgaccattttttaacataaaggaaattgttccattatcattaaaacctgtatgaaacgttcctcgtttatttaatactacctcttcaattgtatttatttcaattgaaaagttattctttaattgcaagagttcatgtacatcgccagtatgtatttttgtatctatttcagtttctaagtttaattgttttttctcaatttttttgaaccagaacaaaaacaatagctctgaaataccaggtaattgttttttataagcatatcgactatgaaactgtccgccaatctttataaaatatatacagtcacctgtaataaaaactttataatacatatctgccgtaaacattttaggctttaaaagataaaaacttttgatcataattcccccatcaattttaaatgtatttgtataaacatttttagctagatttgtgctaaaacatatttctcatgtaatacaacactattgtattgaatctcctctccctttgcaacagttgctttgaagccagctagtaacctttctgtatactatccctataagtgctaccccatttccaaccgttttcttctagtatattaaaagcagaatctgatacaaggctctatatcaacctatcaataaattatcaccctataaatatctgaattttctttatattagaggttatctcctaaacaacctcgaataattgtactacatatacataaggagggtgatctattttgtttcgttcctttacaaatggttgcgtcgccttagtgcaacgcttcttgccagaaccgtttattttatcatgtttactaactgtttttgttatcttctttggtatgtttgcgactcaccaaacccctgtagaaatgattaatcactggggtaatggaatttggggactcctcgccttttctatgcaaatggcacttgtactcgtgactggatctgctttagcaaatgctcctcttattaaaaagggattaacgaaagctgccagactaccaaaaacgaatggacaaggcattattgccatttcaattgtaagtttacttggtgcatacataaactggggctttggaattgttgtatctgttttatacgcaaaagaagtggcaaggcagctggacggattagattatagactagcaatcgcctcttcttactctgggtttctcatttggcatgccggtctttctgcctctatccctcttacgttagcaacaggcggtgaaacgttaattaaaacgactgctggaagtattaaagaggcgattccaataacagaaacgttattctcaccatacgctctcgttccagttattatttttctcgttacgatgcctctcattaataaagcgatgcatccagatgaaaaacatacgattacagtagatcctagcgtgttccatgaagaagctgctgctcaagaagtagaaaaaaatacgttcgctgaaaagatggaaaatagcattattattacactttgcgttggattgttaggtctcatttatattttcaattacttttatacgaaaggttttaaccttactctcgatatcgtgatttttatgttattaattgcaggtcttattttccaccgtactccgattcagtatattcgcgctttttcagactctacgaaaagtgcttctggcattttacttcaatttccgttttacgcaggaattatgggcatgatgattggagcaaatagtgaaggactttcacttggaggagctatttctaatttctttattagcatttcaaatgaaacgacttttccgctctttacatttttaagtgctggcattgttaacattttcgttccatctggcggcggtcaatgggctgtgcaagcaccaattatgattccagctggcgctgaacttggtgtacctgctgcaaaaacagcaatggcaattgcatggggcgatgcttggacgaatttaattcaacctttctgggcattaccagcattagcgatagctggtttaggtgctcgtgacattatgggattttgtgttgtgaacttactatatgcgggttttatcattagtctatgcttcttatttatttaaacgaaaagctagttttatactagcttttttacataataaatcacttatttcccatgcaatttataatcttctcccactctatctccgtaagatgtaatgactcaaatgcaaaaaaatcttcgcaaatttttccgattaagtgtggatgttcactcaaaaaattccactgtaacgctttaggaagaaaatatgtttcatattctttacttccccgtactatctcatctacttctctttcacaaattcctcttattaaataatcatttcttaactctatttgaatttgctgaaatgtttcgctacattttttcaattgaagtaaacgcgtaacatacttccgaaaaagttcgccatcatactgaacacagtttataatacagtcaacttcattcataatgtacgagccttttcttctatttgtaataaccatttttcacgctttgatactttactctttttcacagattgaaacactgaccgttttatattgcgaatgccacaaaaacgtaaaacacctctcttcatcataatccaatctgctgatcgatataacaatgcgacgtaccataggggcgagtctaacttattaataacccatgcttttttcccttgcaataatcctttcggcagagccccttcatatttataagcaaatccagctacgaaaatacgatcgataaatccttttaaaattgctggcatcccccaccaccatattggatagatgaataaaagtgtatctacttcttctactaacgttctgtaccgagctgtttcttcttcatttactaaatcacgtcttttcttctcttcattaaatacgaggactagatcaaattgttctttgtataaatcaagcagcgtaactgaatgatttgtttccggtagtcctttttgcacatgatttaaaatcgccgcgttaaaacttgaaggattaggatgagcgtatacaattagtacgttcactacataacaactccctctatacgttaaagtttccccttctttaacatcttctctacaatctgtacgtttttcgaactttgcaataatcgattcaataatataagtaattcttctttttctaaatctctcagtttctctttaactgcactctcaccagcaccttgaatatcataaacaactgccgccatatgcttacaaagattctcatatggacatttgcagctactttctgaaaaatcttcgagatcgataactacttcataatttcctgcatttccagtaacgaaagcaaacacttttttatcatgtatttcaacatcttctacatgtccatcttcataatattcatatcccttatctacaatgtactttgggatccatttcgttatatcttttaataagtaagcgtacataattgtaccccttcctttaattcccttttgacttcaaaaatcctgtatgttattctaataactgtcaaatagcaagtctatatgacaaaacgactgacacctattcggcgaaggtgtctcttttcatttgcagccgatatgaattgcctctttcaggcacattcaatttttgacactacacactcaacaccattccctgtatcaggctgctttagcagtcttttactctacatactccgttattttaagaaaaaaagagagcttagctcccttttctcgccttatacaatacccctttttcagcatagagatattcatcagctaatgtaattttcccatccagttttagttcgtctaataatcttgataaataaaattgatgcaacatctttttcgtgaattttccttcatgatgcgaaacgatatgttcttgaatatctaacaatgatatcggcttatcttgctctatcatatattcataaactgtactacgcagttttacgtatttttcgagtgtcacagtaatgcgcaacccctttcttcttaatataaattttcgtaatcggtttttttgcaataaaaaaacctctccgataagaagaagttacgtatatatcttcgtcttatctcccagaacaaatatgttctgctggaattagcacctgcatcgcggttgctgggtttcatcgggccagtccctccacctctctggataagaaaatattcacttaattcttactatacgtaattccactttaattgtcaaataaatataacaaattatattttcttccttactgttcatactacccatatacgaacacgcaaggaggattatgaaatgcatcaaaatgctcgcggatatgtacaagattcttttcaatcattacaagaagctaaaaattgtttagaagaagcgctcgaaacagttgaaaaagattttaatcgcgctcgtattgaacaatcactttatgctgttgaacaagctattcaacgttgcgagtacaccgttcacattttagaaaaagattaaaaacttcccatcaattgatgggaagttttttcaaatggcatacttcataattattgccgttataattaaaaaatatacagaattagcaatttctaaaattcctacttttataatagaaatttttttgccatacaacacaattgctcgaatggcacttggtataaaaataagagaacaccagggattaatcacaaatatgattatcgttaatacgatatgatatccccaagatataagacgatacttcgggttatttttttcacgaatcatcgttttcacatagaacgtactacctaaaaagtataaaaatgaaataagtgcaatgaatatagctgtatgaccgatttgcttcattgaaaagtaataactaattaatccaccgatacaaaacacaataatcgcacaaatatcatttaatagtgctctttcatttttttgacgagcgtaatacatattcactataaataatggaatcattactattacgaataaaagaattcgccactcatataataaagaaatcatcccaaataggaacgcaatactgaaataaacaatggcagcttgtaaaaactctttttttcgtctttgctttatgtacgtaagaaatggatacgtggctaaatagataaaaaaccacgctaaaaacaatggaatatgataaatagtaggtttcccaagtatgacacttaataaaaaaggaataacaagcatagcccatgcaccatgttgcttcggaataactaacttcattaactatacacctcccttttgaaaaaagttctcacctaccattatacaaataattttatataataacggatgtatattaaatcgattttttgacaaaaaaatgctccttacagtatgtaagaagcatgaaagaggcaaacgaatatgtaagtcgcgaccctaccttatatgagtatgcttttctatgtcacgttatgctcatctaatataccgtatttctttttaaatcttgtaagaatcgtaatccatgaagtactaaatagtaataagaaaataacattcgaaatcgcatggctcaaatcaaagtaaaaacttgcgatataatacgaaatgacagtttcccatgttgcttctcgtataaaaccgagaagaccccagaaattcataatccagccaaataaaaagccaacaattactccgtaaagaagtcttccccatagctttttcataaaaaatgtattacgaagtaaacctgctataaaaccaatcatgccccatgaaaacatttgccacggtgtccatggaccttgtcctaaaaaaatattagatacgattgctgctgtagcaccaatcataaaaccagtttcactaccaaatacaattgcagaaacgataatgacaaaagaagttggttgtacacttggtaaaatagaaaatggcacccggcttactgctgcaattgccgctaatacagcaacgagaacaatttcacgtgaaacaaacgcctttctttcaaaacggatatagaaaggtaacataataaccgctaatataaacaaactacttaacatgtaataaccgtccatgacaagtgtcgtaaggagtaatgtgccgattattactgcaaagatacatattatgaatgcaacatatcttttggacaagcttcgtacacatcctcccacgttaatgcatatggcaattcttttcgaatgaatcggttaatagatgttgtataaaagaagttgccgctaaaaaattctttcggtgcatcattcataatgactgttccatcaaataacatcatacattgatcaacgtatttcgctgcaaactcaatatcatgcgttgccattacaattgttgtaccttctttttgtagcttcctaaatagctctcctactctttctttcttccatggatctaatccctttgtcggttcatcaagtaataataaagtcggctttgataataacgttgtacataatgcaagaagttgttgctctcccccgctacaatcgtgcggatggcgttctttaagcgagtacaaccaaaactgttttagcgtatcttctgctatttcttttccttgttctccatataattcacgcgcacgttcataaacctcgtcccatactgtatcaaatgtaaaatggtaatacggatgctgcgatacatacccaatacttttaaaacgttctttcgaatcaattttatgtattacttttccgttccactttactttccctcttctcgctttttgtaatcctgctaaaatcgttaacagtgtagacttacctgtaccattcttcccaacgagtgctacccattttcctttttcaatcgaaactgataaatcacgtaaaataagcggactatttttttcatattggaacgaaatatgctctgcgcttaaaattacctcttgcttttcactttgtgctattggctcatttacatatgatatcgctgcaaaatcattcattttcatttgcgcctctcgcactgtaaacggaatatctctcacattccactctaaaaatagccttggaatttgcggaataaatggacggaatgtttctactccccacatatccgtaataacaattttaggactaccatcatacataatacggccattatccatacaaacaacgcgtgttgcaagcgggataacttcatctaaacgatgttcacttaaaataatcgtaattccaagttcttcattaatccgttttaataatcctaaaaactcttttgcagcgattggatctaactgcgctgtcggttcatctaataatagcaatttcggctgcataactaataccgcagctaaattaacaagttgcttttgcccaccagataacgtgtgaacagattgatgcaataaatcttgaaatcctaaaaagctaataagctctgctattcttttttgaataatatgtgatgataatccgatattttctaaagaaaatgctaattcttgaattactgtatccataacgatctgattttctgggttttgaaataccatcccaatttcttgggcagataacaaatcagctacttcctctattaaaacaccctcataaaatatctctccagaacgcgtaccaattggaagtaactcctttttaaaatgttttaataaagtcgtcttcccagatcccgatcctccagcaagtgcaataaactcacctttttgaacagaaagagaaatatgctgtaacgctttttcattttcatcagcatatacaaatgataaattgtttatttctgcatgcgccaccatatccattctctcccttccattatgattggtaaactaataaacatcgtaaatacgacaaacatcatcccatcgtattgctgaaatagaatcgattcgactttcggataaataatcaatttccccccgccataattactacatataatagcagctataaataaaatgattaaataactgagcgtataccaatcgcgcctttccattctatagcgaatatacgtcgtacgcttcgttacaccaaatccacgagcttgcatagaatctgccgtttgcagtgcatcttctaatgaacaaattaataatacttgcagcaattgcataccatttttgacgcgttcaattatcgaacctgaatctacctgcacacctttcgtcttttgaacgagtgtgattttctttaatcgccttataaacaaaggaacaaatctcactgtaatcatcgttaacaatgcaactttcggtgaaattcttgaaaacaaatataaaaatttatgactggaaataatatcattgtatgacgcaaacgtaaacataactgcaactagtaataaccccattactatgccaaacataatcgcctcaagcttaatacggctatcacctaaccaaaataacgtagttcgacctctatgcgttaataacgaattaaataaaattaccataaagaagaaaacaattgtgctcggtagcatctttcttatcttttcgctatttccttgcatcacatttaacataataattaatactattgctccaattaaaaaaagaggatgaagacacatcatacatagtatcatcaccccgatataatagaaaaaattcacaaaaggatgtaaagaagaaaaacttattttcatagccctttaccgaatgcctttcttattgtaatacgtatacccactcaattgtatctcctggttttaccgtagctacaccagcactatggtttggaaaagcaccgttcacacgatatttccatccactagtatccgcaatatctttttcatataaatcattaataccttttacataaatactatctctagatccgcttgcatcaacatctaatcctgtacgttgcaatactttatacacagtatcgccatcttgtacatccatctttttcgcacccattatatatccgttatttccttttactgagattgttacttgttttgcttgcggtttcggtactggtactggatctggttttggtggttcaggttttggtactgccggagtcggtatcgttttctccgctttattcggatcttctttttgctcctgcttcggtgtttctttcggctgattcacaacctttgcttcttcttttacttctggtgctttcggttgttgtttctcttcttgtacttgttgctgctctggttgcttatttacagcaggttgctctttcggttgttcctgttgtttctcttctttctttacctctggttgtgcctgcggcttttcctctttcggcttctcttctactttttgttcttgtttctctttctgttcttcttgctgcttttgctctgattcagcttgcttttcttttgttttttcttccggcttcgcttcatctttttgttctttttgtttcgctacctcttcttgcttcggttctaccttcttctcaggctttacagctgcctcttcacatccggcaagtagcccgagcgaaagcagtaaagaaataaaccatttcaccttactcatcctatctctcacctttcatacgaaaattaggagcaaataattgctcctaattttttgttaagctgctttacgtctccataatacatatgcagaagcaatacataatacacccatacctacttctgttgctggactatgagaagatgctcctgtttttggtagactgttaccgtttccgatttttttattcttaaccggttcgttatctacaactacttttagattttcatcttttgtttcttgttgtacttgtttttgttctttcggttcttcagtaacttctttttctactacattattttctggttcaacgaccttttctggctcttcaatcggttttggcttaattacatcaccagcgtctacattagaccaatcataaatagattttcccatttccttaaattgaagtaatgctaaaagagcctgttctgtagccattccgttaccattttgatcacttggtaaccatttaaattcaccatttgaaagttgatatgataataggttttgcattgccttatgaagacgattttgatctacatctttaacaagcgataatccaataattgcttgcgcagtactatttgaattttcttgtccatcagctgaaaaaccgccattttgcagttgttcgttatataaatacgcaacagctttttgtatagctggtttcacatctgatcgctcttgataaggagctaatgctgataaaaccatacctgttacatcaacgctactagcactatctttactacctgaactattataagtccatccaccgtctgtatgctgattatttaacagtgcttccactagagcaactctgttccattttgattcaactggaatctcatacttcttcgtatcaaatgcaagtaaagcaaatgcataacctgtaacagaattcactttatctgactcatacaatttttgaactaaattatgtccacctacatttttagggtctgcactcattgcattcatcataataattgttctagctaaatctgtcgctgaaaaacggttaatacgcttttctactttttcagttactgacttaacataatttaattttgcctcaattggcacattctttccagaacgagaaagcgctacagctacccagtcactttcaattccatcttgtaacatcttatctgatgttttagaaatggcttcgtttaattgtgcacttggaacttgaatgttctcttgctgtggttgttctggttttttaccatcttggtcaccttgatttttcccatctagcgttttatcgtcttggtcaccttggtttttcccatctagcgttttatcgtcttggtcaccttggtttttcccatctagcgttttaccatcttgatcaccttggtttttctcatctggcgttttaccgtcttggtcaccttggtttttctcatctggcgttttaccgtcttgaccttttgattttggttcttctgttttgccaccgttaggttcttctgttttacacgtcccgaacttatctaacgtttctttcaatgtttcctggcttatattgctccagtctgaaacaaagcgaaagacaacaacatctccagattttaatttataactatctgctccgacttctgcagacttatcatttacatcatacagccaagcacttgtagccccggccattaaaccatcgatgccttttacatatgttccaaacgacatcgtttcagattctaccttgtcccccatgaccttttgcagcaaacttaaagctgtttccccatctttaatttgctcttctttcggacataacataatgcctttttgtgattccccaataattgcaagttttgctgtattttcttcagcaaacgtaatatgtactgtattcgcaaaagaaacaaatacaagtgtcactgccattaacgacgtaagcagccactttttcaacattgccatcccaaaatttcctcccttactaccatttacacaaaaaaaggcccttcaagggcgtgcgattgacactctctttttgtaagtgtcgaacaaaaatgtacaacacctcctacccgcattattcgcggctatatttgtataggaaaaataattttgtttatgaacgtatcattgtgataacattcacttttcttggcacaacttacttccatttaagttatcgtaaaacgataaacctatacattctgtaaattttaaatttctgtattattttactattgacaaagaattttgtccatgctttatcggatttattttctaagaataataacttattaactcttaactatgtaaactcttttcactaataatgacgccatcttcatccgcatagacatattcatttggattccaatccacttgtccaaagtgcaatgaaatatttcgttctccttttccttctttcacacttctatttggcatcgttcctaacgctaaaataccaatattaatattctttagttcactagaatcacgaacatacccattcacaataattcctgctagctttctttcttccgcaatagctgccaaattatcaccaagtaacgcacaattagtagacgctccgccatcaacaactaatactgttccttctggtaatgtttgcaatccttccttcactagtacattatcatctttcacttttacagttgcaattttcccgtggaattgttctttcttcccaaaagaccgaaaagactggcgacatatttgtaattccttttcaaactcatcacatagatctgtagttttccacatcttgttccctcttttcctttttctttctacataacatattcttggcttattatcgtttccctgtctaatattgcaataatttgtatgtacgggaaaaggatacaaaaactattgccttaagaagctacctttattataatctatttcacggattgaattcagaatattaaaattaataaagtgaagaaggaggaattttatgcaaatacaaactgaggcaaaaaaacaacctagtaaacaaaagtttaaaatgcctgatgcgtacgtactactattttttattgccttactttgcgctattgctacgtatttcgttcctgctggagaatttaaaagagttacaaacgggaccgttacaacgacaataccaggtagctatcattctgttccgcaatcacctgtaggatttgtttctttttttaccgctattgaaaaaggaatgacacttgctgctccgatcatctttttaattttatttacaggcggtgccattgccattcttgaaaaaacaggtgctcttgacggtttaatctatcatgttataaacaaatttcgtaatcagcaattacttttcatttgtatcgttgccgcacttttttctattctcggaacgactggcattatcgttaattcagttatcggttttatccccatcggtatcatcgttgcacgcacattaaaatgggacgctatcgtcggtgtagcaattatttatttaggcacttatgctggttttaacgctactattttatccccctcacctttaggcatttcacaaaagatcgcagaacttccgatgttttcgggaattggtttacgcacagctatctatatatcttttttacttgccactatcctttatattaattggtatgtaaagcgcttgaaaaaattgaataaaggaagcattcttggcgacaactggtttccaagtaacgctctttcaagcgaaaaggaagcagagaaaaaagaagttccttggacgatacgtcataaattaattttactcgtttcagctttatcattaattgcatttttaataggcgcttttcgtctacattggacggacgcagaaatgaccgctacttttattttcatagcaattacagccggaataataggtggcatgaaagcaaacgatatcgcttctacttttctaaatggctgccaaaaccttatctatggtgctttaattgtcggaatggctcgctgtatttcagtcattttagaacaaggcaaattacttgatactatcgttaaccagctcgcacagtctcttgaaggacaaagccctgtatttggtgttatcggtatgtacgtaagtagtgccgcattacatttccttatttcatccggaacaggagaatcggttatttttattccgatattagctccattagctgatttcatgcacattacacgccaagttacagtacaggctgttatgctcggcgagggtgtagtaaactgccttaatccaacttccggtgttttaatgggcgttctcgcagcgagcggcatttcttatggaaaatggattcgtttcatggctccacttgcactcatttggtttatcattggacttgtttttcttattgttggggtgaatattgagtggggaccttactaaatacttaactagataaataagtactatcgttccatataaatatctattctatttccctcactagtcctataaaaatcatttattctagtaaaaatataagaagggattgatcataatgatcaatcccttttatcaaaatataatacctttaaagatcttagttccagattttatttacccattcaggatgatcaataaaaggattgcggttatgttgatattttgtaaaaatcacttcattacgctttcgctctaaatcatcgaccgggtcttgttcattccattttaataaaacagatacagtctaagacagaaataataaaaatcaagatgatagctcgacttttcccttttccataactgtctttatttttgtgtaaaacctttttttctctgaataatacgtacaaaaatagattggataccatgtaggcaccaatctattttaattaaagaaactgtgtcaattctgagttcacaatacgttgtgcagtaatgataacactgtcagctgttagtccataaacactatatagtccaccaggttgattaggaacaatttgaacttcatattcaaatgcttgtccaaaagcaggatgaactaaacttagagttacaaaagtagaagcattagaattcacattgaagtttacctgttcaattaatactaatgaaccgtcaagtctaaaaactctagctactccagtaagtgggcccgcagtacggttaaggattttcaccctaactctatttgcattagcaggttgatttcctacgttttcaattggtcctgtagtaagagccatataacatcacctccattatattattatgatattcaacgataaacattaatgttatagtctaattacccaatctacttaaaataaaaagaagctccaaattctattatatttaggtcatagatattaaacttaataaaatcaaaggcaggagcatatttgatatgttcctgcctttttattgtgggataccgataaatagccctctagctaagattttaaagtgctacaaaatcaaaaattttatctcaccacagttttctacgagaatccagtgaacagcttatttacataatttttgttctcggaagttgattttgtagcgccctttctcgtaattcactatgttttccaaagaaaatagtgaaaaacagggcgatgaatacatttacaaaatgacaaaactgtaagaatacacgaatgtttgtaagaaagttcgatgttttcctttttctttttttattatagtgaaaaagaagaacgaaatattctcttatgtaggaaaggaagataataatgattgatctattaaataaatggatgttagaaagtacagccaattttaatatcgttgtaggacttacagcacttctatttttgggttcagtaattgcacttattattatttacaaaaaaattggtaaaccagatgaaagaacaaatgctatttatttaaaaattacttctcgtatgtttactactcaaattctaatgaatgctatatttatttctttagttggtaaagatattgagaatttccgtcaaatctttatattatttgaagcttttgtattctttattggagctatttattcgtttaaattatatagacaggagtacaaatagttgatccccatctaatttctttgcttccgctgaattttgaggtgagggtcttacttcccggcgaatagcgggataaaactagaacttcttttcctatgtatcattatttcgttacttcaccaaactgcgctctcgtcactttcgccaagtcctctactttaagctcaatttgtataccaattttcccgccactcactatcatcgtttcaagtgattgggcactttcatcaatacatgtagaaaatagctttttcattccaactggtgaacaaccgccgcgaatgtatcctgacactttcgtaatatctttaacaggaatcatttcaattttcttttcacttactgcttttgcggcagcttttaaatttagttcctcatctaccggaatgataaacacatgataatttttactattcccttgagcaattaacgttttatatacttctctcacttctcgtccaattttctcagctactgatacgccatcaatttttccatcgtctggatcatatgacatcatcgaatattcaattttttctttatctaatattcgcatcgcatttgttttatcttttttcataacgttctccttaaaaggttatttcatattattaagttttattatacacccttttccatttctcctacataacttcacgtatatttcaaaactaaaaatattgataattcaaaaatcatctgatataatttggaaaaacttatgttaaggagagatttgtcatgcgaaatgttaatacttctttccaacttcatcatcatacgtaacgccgtgtatccgaagaaaaatttttcttcgtgggtacagggcttttcctgttgacccacgaagcgttcataaagctatgtgggtatttttatacctgcatagctttttttaatttaaaaaaggagtgattatgatggaaatgagaaatgtaaaaggaacgaaagactatttaccagaggagcaagtgctgcgaaataaaattaaaagagcttgtgaagatacgtttggacgatacggatgcaaacctttagaaacgccgacgttaaatatgtatgagcttatgtcttacaagtacggcggtggtgatgaaatattaaaagaaatatatacacttcaagatcaaggaaaacgtgatattgccttacgatacgatttaactattccattcgcaaaagttgtggcaatgaacccgaacctccgcctcccttttaaacgttatgaaattgggaaagtatttcgagatgggccaattaaacaaggaagatttcgtgaatttatacaatgcgacgttgatattgtcggtgtagaatcagtcatggctgaagcggaactcatgagcatggcgtttgagctgttccgaacattaaacttagagatatcgatccaatataataaccgaaaattgttaaatggtattcttcaggccattaacatccctactgaattaacaaatgacgtcattttatcattagacaaaatcgaaaagattgggattgatggtgtacgaaaagatgtattagagcgcggaatttctgaagaaatggctgatacaatatgtaatactgtattatcttgtctaaagcttacaattgttgactttaaagaagctttcaataaccaactcgttgccgatggcgtaaacgaattgcaacaattacagcaatatttaatcgctctcggaataaatgaaaatacgatattcaatccgtttttagcaagaggactgacaatgtacacaggtactgtatatgaaatcttcctaaaagatggctcaattacatctagcataggtagcggcggccgttacgataacattatcggagcattccgtggtgatagtatgaactatccaacagtcggtatttcattcggtttagacgttatttatgcagcactatcgcagaaagaaacaatctcatctacagcggatctatttatcatcccgctcgggacagaattacaatgcttacaaattgcccagcaattacgttctaccacttccttaaaaatcgaactcgaactagcaggacgcaaattaaaacgtgcccttaattatgccaataaagagaatatcccttatgtgcttattattggtgaagaagaacttagtacaaacactgttgtgctgcggaatatgaaggaaggtagtgagatgaaggttccgcttacttctttgaaaaataatacattgaataaatattttactacgcctactacgttatgactgtgaagtattctcaaaatgtaaatcaggtaaacaaaaaagggctgtccgcgcatgacagcccttttcccttaatgaacaacaccttcataagtgaaattatattaacgattttccgaatatatctatcataatttacactatatcaacgatacatagatttttcatttgatagataaccgggcaattagtttacataaaataattatactcaatttaatcttacaaaactttaacatccaattacctattttaataatatatggttttctaatttcactaccaatttaagaaaaattcatatccttctctactataccactttcatctattaacttttattttgtgcattcctactctccaaaactttctccatattatgagttgcccattccatcattaatagaatcattggacgaagtgattcaccaagctcggttaacgaatattctactttaggtggcacttcacggtatacttcacgatgtatgatgccatctgcttcaagttctctaagctgcagtgttaacattctttgtgtgatattaggttttaatctttttaattcattaaacctctttttcccatctaataaatgatacaaaataacacctttccattttccaccaatcacctcaaccatagcttcaactggacaagaatatttatttaaaaatgggtaatttatattattttcatttgaacaatccataataaatcccttcccttaacattagtatcttttttgatactataccacataaatgtgcgtacttgtatctatgttactttaaaaatataatttacttacaaaataaattaaagaaaagaggaacttttatgacaaatacaaacgaaattacaaaagagaaaattatggaggcttttcatttcagacatgcatgtaaagagttcgatcctatgcacaaaatttcagaagaggattttaaattcattttagaaacaggcagattatctccttcttcttttggatatgaaccttggaaatttattgtcgtacaaaataaagaattaagagaaaaactacaaccgtattcatggggcgctggtgggcaacttgcaacagcaagccatttcgtcattgttctttcaagaaacattaaagatatgcattatgatgcagagtatattaaatatatgatgaacgatattattggattgcctgaagacactcaaaaaattagatatgaattcttcaaaaagttccaggaaacagattttaacttattacaatccgatcgtactgtatttgattgggcatctaaacaaacttatattgctttaggtaatatgatgacgagcgcagctcaaatcggtattgattcttgtccgatagaaggattcgataaagagaaagtagactctttacttcgtcaagaaggcattatacagggcgataactttgaagtatctgttatggttgcctttggttaccgtaaagaagatccaaaacgtgataaaacaagacagactatagatacaattgttgaatggattaagtaatgtagcacacacaaataatgctcctaatagctggatacttatactaaagaactattagtcgtttttcttatgtatgaatttggtttttcatggaaagatatattagtatgtatgcagtttgagcactctattttttagagtcgaacaggaggagaatgaatatgtctgatattgaagttggcgaagtgtttactcttagtgatgagaataacgaagagcaagaagtagaagtacttggagcgatggatgtcgaaggcgcagaatatattgcagttgcctttgttgaagatatccaaacagaaactgaggaagacattgatattttctttttaaaagtagaagaagataatgagttttcatacattgaaaatgatgaagagtttgataaagtatctgctgcgtttgaaaagattttggatgagcaagagcaagaatagtatgaatgaaaaacacgagggcggatgcatatccgccctctttttattactcatccagagactcacgcagtaattgcagtacatctttcatcgcaaaaggtccatcttttttaacatgctccgcaaattctgaaacgagacgtaatgttctcacactttcgattggatgttctcctgatgcactttcagctgaaagcataactgcattcgtcccgtccagtacagcttgaaacacatcagtcacctcagcccttgttggaatagaatgatctaccatagattgaagcatttgtgttgctgtaatgacatatgtattcgttcgattacattcctgaatcatcattttctgtaaaagcggaatgcattgatacggtaactctactcctaaatcgccccttgcaatcataattccatctgcttctttacatatatcctgaaaattctcgattgcttccatcgtttctatttttgcaattatattaggtgacgtttctttatactgttgtataaaatctcgtatttcttttatatgactaggttttcttacgaaagaacatgcgataaaatcaacattctcctctaaaagaaactgaatatcttttttatctttctctgtaatagctggtaaacgaacagccgcacctggtaaattaactcctttatgagatgagatattgccacctgtttttaccttcgtttctattttgtccgtacttatcttttcaacaattaattcaacttctccatcattaattaaaattctactgcctactttcacatcattcggtattccttcataatcaacactcgcttctgtattactccctgtaactggttgtgtatgtaaaataaaagaatctcctgcctgaagtgtaatttgctctcccttcacttcacctaatcttattttaggtccttgtacatcacccaaaaatttaatagagtcatctaatgatttcactaaacgaatgatgtctttatgactttcatgcgtgccatgcgataaattcagtcgaataattttcataccattctttattaactgtgctaatgtttctttattattacttgcgggtccaattgtacaaattcgatcgattgtcatttttgtcaccatcctttttttaataagtttcccatatgaacttaaaaataacagagattctgacatgaatagatttaaatttacatgaatttcataaaattaaacctgtatcccttgctggctaagcattagaagatatattcgcttttttgcaaatgaagacatgttgaatcgaaagtaaaagaaaagttaagtatgggataaaccattgagagtttcgaaattttcatatattgtatgaattgagttcgaactcaaaaatttaaaaaggtgggaaaattagtgaatatgaaaaaatctttatcggtgacaactttagggttagcggttttaggttttggttttactaataacgcaagtgcttcagagatcgatactgtagacaagcagcccgttttagttgactttgatacaattcaatcaacaaaaacatctagtgttcctagtttgactattgcagctgcacctaagaatgactctaacattagcgtatatactcccttttttggtaacccatatgcagttgctaaatcgacatcaactacgaccgaagactatgtttatgcaaaagcaagaactttcaatggcgatagctcattagtaaatacgaaaagtaatagtgcaaaaaaatcatcctttgtaagtgctacagcgaccaacacaagcatttattatggagatgattacgctatcggtaatcatacctataaattaagtggttataatgatgtgaatcacgaaacaaaagctttctggtaagaaagagaaaaaagatatgcatcttgcatatcttttttctctaatattttacatatattgaggtgctatttatgaaacaaatatatattattagcggtgttttacttatttcattacttacaatttatattttgttcaatacttcaatcatacaacctcatccaccttccatagaaaataaacgcgagcaacaaaccaatactatttcttacggattgaaggataatcaaggccaacatattaacaatggcagtacaattactagtgaggataataaaattaatgtaacattatcattcgtacatactattaatgaaaaccgaaaatatggattaattgttctagaagattacgaacaaaaaccttttaaaatagaagatactactaatgaaatatcacactatttttttgatatgaaaccaaacagttcaatgactacgaaaatctctttacacacttctcctaatgcaagtgcattaacctttttaataataaaaaaacctgaatacaaattaaaagataataacttaaataaagcagctattttagaagatattctaagtatgcgatattcaatgcatcctcttcagaaagaaaacgaaaaaataaaactcccccttatagatccagatgctattttaaaagatggtctttacgaaccagtatttgttacgaaccgtgaagagaacttacaaactgtcttctttgaaaaggaaggcaagcaattaattttatcaaacggtaatgaaacaaatgatgaaatgacttacgcaatcgtggcttttaaagattggaaacaagttgaaatatttagcaatagaaaagtcgtttatactaaggttgcacctgaaacaagacaaatctttaatttcacattgccttcagtggatcaagaaagtaattttcaactcgtcgcttttccatttccttataaagttagcgaagaagattatgtcagtcaacaagcattcagttcctttcgcatcgtaattgaaaatgaaaataaataagttatactgtgcacattacaacaacctaaaaaaggcctactcacacgagtaggcttttgaaactatgaaagtttcgtcaataactgatttaaatcttttttcgttttcgtcgttaatgatttcattttattaacatcaatcttttccttctccgcccctacaattaacggatacatactttgaccgattgttttagaatccgtcggatgtgatgcttctagctctttttcaatcacatcccacttttcgttaatttgtttgccaagcttattcactgtttccaatttcggattagcagctaactgcttgtccaagctatcaattaatgctacaacttctttaacattcgttttcacagcaacacttttcttcggatctttcgttgcctttccgttattgtttgtgcttgtacttgtgctttgatctgctgttttcccgctagtcgtttgatcattcgtttttcctgtcgtttctttttcttttgtttttacattttcgttttgagttgacgttttgccgttactttctgttcctgatgattctttcgtattttttgcatccttatctgttttttcatttgaagaagtatttgtttctttttcagtatctttcgttgtttttgaagcttcatctgcacttgtcgtttttgcttctccatccttttgcgcagttacttgctctttcttttccgtttctttatctgctgaaggactacaagctgccatagtaagcattgtaccaattgtaatcgatgcgatagcgacctttttcattttcatataaatccccctatgttttacataatttatcctcccctttacgattcgattcccccttaaaaaatcccttttcatacgaattatcatctttccgacagtaatcttcataataatacgtacaaaaactgataaactcattttaatattcgagtttcttctacttcatttttctgctcacaagtaaaagaaaaagagtatattgtcacattaagaattactatcttcatatgacaatatactcttctatcaaatttttatctttcttgacattttatttatacaaaaaaataaaattttctttcgttttttgtttctcaacatttgttaacataatatttttatgaataaccaccattcgagtgaatgacttgcccagtaacccatttcgcttcttcacttactaaaaaagaaattaagcgcgcagcatccaccggttctcctactttaccttgcgggaatttccatactaaatgatgcttcagctcctctgtaatccatcctgtattcgtcggtcctggatctacagcattcactgtaatccccttctccattgcaactggtgctactgactttgtaaatgcttcaattgcccctttcgttgctgcatatgctagttcatctggcattgggcctactgactgtcctgaagtaagattaataatactcccgcccgttttaagtgaataatgttttataaacattgaacttaatagcatagtagcccgaacattaactgtataatgtttatccaactgctctacatctaattcctcaatcctcgtatgattagaatacactgcattattaactagaatagatggatcacctaaccgttctgataccatataaaacaaacgatttggcgaataagactgcgataaattgatttctgccatttcacatcgaacatcgtaactttcaatttcctttttcagcaaaaagggttcttgatcactcattccccatggcatcgctttatcatactttggccagtacgtgaaaaaaatgtctatccccttttgagcaagcaccttgcatacagctgcaccaattccattcagacgagttgcccctgttacaattgctattttcttcacctttttctcctccatctatacacagatcccctgcatgaatacagaggatctatcttcttattgaatatttgacagtatacgttcagcacctaattttaacattttaataaagatataatttacaatcgtaaacattacaaataaaacgataaacataacccacagtccgacatgaaggaagaagtataatacacttactccccccacaataattaaagctattaaaatattagctaaaaaattccacaaagttgtatatcgacttttaaataatttctgctctgtatcccaatgaatatctgcagtttgtgcgtcccagcgtgttccgattaaattaattaataacaacccgttcgcacttagtaaaaaccacagtatcataaagactggagaaatcccagctacaactgccatcgtaataccgaatactgctaaaatgatcacattaattaaccaagcagtgattgctttcgcaaaaaagatatccgaagcctttactggtaaataacgattcacaaaccaagagcttccatctcgcgaaaatgacgttgttgcaatgacgttactacccattaaaaataacgatgcacaaaggccaacaccaattgcaaatcccgttgtctctggattgttaatatactctgtaataaactttaaatttccatcttgcacaaataaaataaagaacaacataattggcataacgaaagtttgtacaatgcaatttaagaaaaattgtggtgtacggaataacgttttaaattcttttttcacatacgcttttaaatgcgaactttgtactgttgatttctgtaaaccttccgccgaaataacttgtttctttgctgtactcgtcgaaagtccaataaccccttttaaatatgtacgctctgctatgtaataaaacaacacaaagaagacaaatgaaataactgcaaagattattacatataaaggtcccttccaatttgcattttctactaatgccactgctccaaaatatgtagttggaaaatagtttgtcatttgtactaaaagagaagactggttgtttgcaaggtaatccgcaattgcatcttcagaaaacgaacttttatttttccactgcaaaaatacgttaattcctacaataaatagtatacttacgattccaataaatatatttcctcggtctttatttttcgctatatttgtatacctcataataactgtcatcagtaacgaagctagtactaacggcacaattgggaagagtaagtaaatgaaaatcatatatatgtaatatgtaataaatgcgccactttttaaaccgtacgtaataaagatcggtaataaaataaatgaactcattacgtattgtgtaattaatactgttaaaaatttggctgaaataatttgcgctggttttaatggtaatggtaataacatttcaatgtcattgctgtagtaaaatacagttaaaatgttcgtaatactcattaaaaatacccatatactcgcaatcgcaagtcccattgcgataatcattcctggatcttgccctaaatgtatcattccctcatacattgcatgcgtgatagaaccaaacagtaaaaagccgacaaataaaatagctgcaaatgaaaatacatacgcccatcgcttcttcttatctgttataaaatctgcataatttaatttcaataataccttcgttaacgtccaaattttactcattgcccgtcatctccaagaacattttttcaagtgattcattggatttaaaatgatctctcatttcatctaaatttcctttaaactgtaaattccccttattaataatagcaacccggtcacatattttttccgctacttctaatacgtgtgtagagaaaaatacaatctttcctttatccgcatgctctctcatcatttcttttaaaatatatgcagatttcggatcaagcccagttaatggttcatctaaaatccatacatctggctcatgtacgagcacaccaataataacgattttttgtctcataccgtgcgaataactttgaatttgatcagataaagcattataaagatcaaacttcttcgctaaagactctattcgttcttgtcgtacttctttcggcacttcatacatatcggccataaagtttaaatattcaattccttttaatcgtaaaaacatatctggactatctggtacataaccaaacgtcttcttcgcttccatcggctcttccataatattttttccgttaatcgtaatagtccctttgtccaccccgtgaatgccagtaatcatcttaattgtcgttgatttacccgcaccattcggtcctaaaaatccaaagatttcgccgctaggtacagataaacttaagtcttttactgcataggtagacccattataactttttgacacattcgtaatttcaatcattccatccaatcctttccttaattaccaaataactatattgatattatagcatagttctattttaatatttttacatttttcagtttatttaacctttaaaataaatatacacccctaatccaacaactaaaacgacagctagtataatataaatcattgttaagcgtttaatattcccctttgtcgctttgctataatttgcatcaccattccgcccaattaacaccgtcgcaatgacagtaatcactacaagtaatacaacgatcatgatccaagttagcatttcttcctccccctccttacaaccattttacaatattatcctctttatttcgcagcatatttcctctttttactattattatgaagcaaactggaaaactattattaccattcctatccaattgcgatatatttataacataacgtgacttatttctaacaacataaggaggacctatcatgaaaacaacttggataaaatatttaggatttctcggtttcttcggatttttttatgaaaaaggattgtttactatgttctgtttcttctcctttttcacatcgtatagaacagttcaacacgatgaactgtttgaacaaattgtcaataaatcgtgtcgcaatgcatttatcgttacgttactaactaccacaatcattatgtttattgaaatgttatttccaaaccctacgctacaagagattgatatcgctcttattttcggcacactcattcttacattcggcttttctatgttctttttcgataaaccaattgatgaaatggaagatgcaccatggcgttcgtaacgagaataaaagaataccgtgccaaattgaacatgacacaagaagatttagcgaagagcgttggtgtgcgacgtgaaacaattagtcatctcgaaaaaggtaaatacaacccttccttacaacttgctcacgatatagcgaaggcattacatagtacgattgatgagatttttatttttgaggattgattaaagacgtccagtcacaagaatcacataaaaaaataccgtcattctttccaagaagaatgacggtatttctcattgattatccatataaaaccgcatgaaatacgcctaatagcaagtattgatcctgcatgtaatcttcatcatatacattcatctcaatgtaatacatatcttcctcaagacgaatattccaatctgcaattacatagccctttcgtaataactttcccattccaaatgaagttttatgaacaacatattcttctgccttatatgtaaaggtaaataagaaatttgcatccaataactttccgtcacatacaagtatttcatgctctgcatcatgattatctttgtacgttactaaaatccttctttggcgctgcctacttacatcctttgcaatgacgcgaatattgtccttactatcctttatttcataaataatattaccaccaatttttggaatgaaatccagcactctcatcagcgtatttttataatagccccttactacgcctacttgctcacttccattataaacctctatcggtgtcgtatctgctttgctatcacacggtcgtttgtaagagagctgcatcattcgctctcctcttaagtactgatcaaacgtcacaggatattctatcatgcgcagttctttatttagctcatacaaatagcgttgaacactctctattaatgttgtagtagctatacgctcttgaagttcaaattcttgccagctggaaaaaacattccattgattatgatcctcttcatagaagaaaccaagaattacctcttcacggtcagccgtttcatatttcataggcacgttctgcccatgttgaacttgttccatccactgacctaaataaatgcccagctctgcaaccttcatacatgatttttgaaaaaatacgctgtcactcgcgcaaatcgttacatctccttcgataaagccctttgaataagcatcataccgtggctcatccttctgcgggatactcttatctaactcaaataaaaacgttaacatcctttattcacctctagttgttacactaatcatacatgacatcgcatcactctgagagactatttatatacgcatatttaattcacgcattataacacgtgaatgatcttgtatagtagcgctattttttgttctatatcttagtatatgaatttatatgagcgatttttcaaatatatctatcacaacttacaatatatcaacgatttttcaaatatatcgatttttcgacaaatatcagcacaattaaaatgaaactaccttttcttcagccacttctacaatttctaaaatttgtagcagactctccacttcataagtcggattaacactcgtcttattctctttcaaactcggattataccaacacgtatcaatgccgaagtcttctccgcctttcatatcagaagttagcgaatctccgaccattagtacacttgatttatccgtaattccaaatttctcaaatgcataatcaaaaatctcacgcgctggtttttgatgaccaacttcttcagaaataataatgtgatcaaagaaattacataaaggcgaatttccgattcttgattgttgcaccttcgtatatccattcgtaataatacctaacttgcaatcttgaagattttcacataattgtactgcgccttctataagatgtacctcttttcctaagttttcaagatatacatcactaaattgctgtgcatctacttttatattatgaagggcaaataattgtctaaatcgatctactgctaattcacttagcgtaatcattttattttctagatctctccataatccattactaatctctttataacttgcaagataatcattataccctgtaggcataccaaactgtacaaacgcattatgtaatgcgtgtctttctgtttcagggaaatctaataatgtatcgtctacgtcgaataatataaatttgtatttcatgatgttctcctcaattcctattttaaaagcttcgttctcattgcttataagtttttatatatgtcgtgatgaagcgctttaacccgctctttatagaatacacctttatcttttattttcaaatgtgctataaataagtttgctagcatgactgctgtatctagtctataaaataaactaacaatatgaggagtaacattaaagatactatcattcttatatccatctttaaattcatcccaactaacctcatttgtttcagctattctcataagctccagcaatggatgaccaattaaagcattatcccaatcaactattgctttaacttctccattatatccgattaaattggctggtcgaatgtccatatgtaataaacattttacatgatctgctgtactaagaatatattcaattgtttttgtatccggaagattaattttgcagttcgtgattgtattaaacccttctatccgtttcacaattcgttctgctatatacttactaatgggctctctaatattttgtttgtaatacaaaccatcaattggcatactatgaagattgctcactaactcccctattttgcatgcggaaattggcatatgatcagcatacacacaatccgaaattaaaaaatcaagttcggttgaaagatgcaatccgtgtatccttggtactggaataccttttgaatgacaatacttagacagctccgcttccttttgcaacgaaatccgactgttaaataagtcttcatttatattttccacttctctttcccacggtactcgaaatgccaaagaccccttttctgaatctccttgaaaaacaatattttgcactcccgttccaatcacctttaaatcttgaatagctagttccttatactcttgacttagtattgttgccagcttttctcttatcccctctgcttttacacgtgtatgaatcattttattccccgattcttaagctcttttcatccattttctcctcggtgcacaacatcctcattaacaaaattatagcaacaatagtaaaaggaggctaatccgctcagcctccttctcattattaatcttctagcaataactctttcatttcctctaacgactctttcgtaaagccaagagctttttcagcgtatgcttcaactgatccgtattgcttttgaatttcaccaatcgcagcttgcaagtattcagcacgtgcttcaaacattgcacctaatatcgctctgctctcatcgttttgtaatttcgcacctaaaaaggccatcattttttcatttagcttttcacggaatccgttacttagtaagtagtcttccattactgttttttctggtacacctagtaaaagtagtaataatgctgaaccaaatccagtacgatcttttccagctgtacagtggtttactaacggtaagttttccgggttttgcgctaagtttaagaagctcacgaatgcttcattaccacttacgaaatcttgattcattttcacaagatactcacctggttttcctaacatagaaaggtcaccaacttggaaaaactcatttatatttaagtctttcgctaagtcttgcataactggtaagcacacttgacgagcacctgtaatttctggattcggcttatgcttcacttcaaagtctgtacggtaatcgcaaattaactttaaaccagacttttgtaaataggcaatatcccattcagttagccctgctaattcttcagagcggtataatttgccccattttactttacggccttcagtcgtttcatatcctcccatatcacggaagttaaacgcaccttgtaatggcaatctacgctcggctactgttactgcttgtccattacttcctactaatctaaaatatggacgttcattttcactggggttttcaattgtatatgataattccccatttactgttgcaagtaattctccattttcttcaatatgatctggtgaagtactccaataaatacgaacttcttctatattattttcccactttatttgtaacgtattatctttatttctttctacagttgcttgtaaccaatttctttgctgtcccattctttcaccaacgctttctcatataatcgaatctcactctattgtattatacaaatatctactttgtcgttctcatttttctttttatcttacaaacaggcgaaaagttcttttacttgttcaaaatttgtacaaggattaccgcgaaatacgtatgcgatttgttcattacctaaatcttcgtatacaactgttccgcgattagggtgcggataaaactctaacccgtttataatttgttttgggccatagttcattgtccatgaagaaataggataatacgctttgtttttatgtctacaaacccaaagtgcatatagtttattaacttcgtcccagtatacatactgcgtttcgtcatttccgaaaccgaccgattcaagtttccaatttagtttttcatgaattaacaaatttacataggatacgtcatctggagcattccactctctacatcttcctatctcaccaattccatctctttttgcttgaaagctcaataggtgaaatggtgtatgtaatatcattttcgcaaactccatatttactggttgtaacccgaatagaaatctttccatttcatctttgtttacatacccacgatcaatagaaatttcaacttgtgttttccatatagatgtaacgtaactttcttttcctttataatttatacctttccaatacacaagccctttatattgaaaacaatctccttttgcttgagaaatacagctatccggaaatactggttccattatatcgagaaaaaattcctttactcgaaacatcccagttggagtaacaacctgaaaccaaaaagttccccacttttcaccttcataacgttctgaaactttttcaacattccagccttctaacaatacatttggatacaataacacgaatgaatgcatggattgctttaacatatatagtcccctcccgctatacgagttcgagagtatacatcattcatcctcctaaaactttctcacatatctctcagttgaactaagcagctgacatccattcttttcaaaaacatccttcatccattcattttgtatatttgtctcaccaatataataagatgcacctatttcctttaagacaaacatcgcagctgcaaataatgccgcttcatatcccttattacgcatatttggagtaactgcgaagtacataagtttcccttcttctaacgtacctctttcaatatgcgggattacaattcctatcggctcttcatcgacactcgctgttaagcaatgttctttccattgctcaccaatttcttgtagcatcatatgcacaaattgatcatgagcgactggttctcccgtcgcttcattccacagtgaataaaaagcctcttctccaacttcttcaataagcttaaaatcaatttcactttctgcatcttctacttcatatatatctttaaatacaatcatgttttccgtaacatattcaaatgaatacgtttcaaaacattttttatacacatcataatttggactttttgaagagatttcaaaatgtagtttttctaatccatcttttttagcttcagcaacgcaatattgcatcatttcctctaattgctcttctgtaaaaatctctgcattattttcttttatcataatagaagaagcatttcttcttattttaaaatatttttctaactgttctatcgtcgtcatattcttccctcatctatatcatactcgaatttctaatcgttctccttgcatgagcaggattgtccttgaatatatagaatactagaaaagatcgcatctttaaagtgcggaggaggttctccagtggatattacagcattgcaacaacagttagagcttatacaacaaaatgactatacgcaactacagcatatagacgtaaatgagttaactttgaacatgcttcagtatatcggaacgactgatagctacgttcgttaccaacttatatataaatgttttgcgcatttcattcatcatgaattccttatggatgatcagctgaaattacttctgcaaacttgtttaagtgatgagtatttatattgtgacatttactccccacattcagatggggttttcacacgttcttacactatttcgttaattgcgttaatactccaatttgctaattcgcactacttttgtacagaggaggatatcgaagaaataaaaaacaaactcattacatacacaaacttagaaacggattttcggggctatatcgaaaataaaggatgggctcattgtcttgctcacgtatctgatgcctttactgaaattgttcataatacgtatacaacttttgaatggtacgaagaattaattcattgtttattaaataaaatctttattccatctgacctttttcataataacgaagatgaacgcattgttactccattactagcaatgctgtatcatgattttcctcaaaacgagttaatttctattattcataaaaaaataaaaaggcttcctcaaattagaaaacgcctttcgcttaatgagtattgtattttatgtgccaatattaaaacctttttacgcacattatttttcagaacgaaagatgaccataacttagcctttacagcacgtaaaacagaaagaatgttaaaagaacttcctaactattattaaatacaaggagcaatgacatgggttatattgaagatatgagaaatctagtaggaaatcatccacttattttaataggatcacacgccattatattaaatgaaaaagatgaagtattgctgcagctccgtacagattttaaacgctggggcattattggaggcgcattagaatataacgaaacgttagaagaagctttaaaacgagaagtatatgaagaaactggacttatcattaaaaatccagaactattccgtacatactcagggcctgatttctttcaaatctatccaaacggcgatcaagtacacggtgtactcgttgtttatatttgccgagaattttatggtgaatttgtatgcgatcaaagtgaatcaaaagaactacgcttcttttcacttgatgaattacctaataatcttccccctgttattgagaggattattacagattatcaaaaaaaataagggaacgcttaacgttccctctcaaatccaatccgttttttaatttccgctaaatttacctttgcaatagcgcgtgccttctcagcaccgttttctaatgcttcatataataaatccggctcattcatatacattgcgtacttttcacgaggtccagctaactctcgatctacaacgcgaaacaactctttttttacatcgccccatccgattccagtctcatatttttcacgtaatgactgtatttcgtcttctgtcgcaaattctttataaattgtaaataaggtttctagttctttcggttcatttggaagtgaagaatctgttttgattttaaatattaactttcgtagtttttcttgctctgcaaataatgggattacatttccgtaacttttactcatcttccttccgtcaagaccaggtaaaatagctccttcttcttgtatgacatactccggaagtgtaaatgtcgtgccaaatgtatgattaaaatacgtcgcaatatcacgcgcgatttcaatatgctgaatttggtcttttccaactggtacatgggtagcttgaaataataatatgtcagctgccattaaaatcggatacgtatataaccccatattcactcctgcatcgacctctaaccccgcttctttattttgctccaccttcgctttatacgcatgagcacggttcataagacctttcggagttaggcaagctaaaatccaagctaattctagaatttctggtacttctgtttgccgataaaaaacaacatcttccccaagtccaagcgataaccaagtagctgctacctctttcgtataactgctgaacttttctgaatcatgcacagcatttaatgcatgataatcagctataaagtacaatgcttttccttcattattctttgacatttgtaatgcaggtttaatcgcaccaatataattccctaaatgcggataacctgtcggcttaattcctgttaacattattttttcactcacactaactcctcctttcgcaaaataaaaagagcccctcatccttaaaaaggacgagagactcccgcggtaccaccttaattagctatcattagctcacttcatacttcaataacgtgaagtaactgtctttacctactcatttcagttagaagctccagagtccattccatattcatcccttactgattctcaccacatatcagctctctgaaaagtttcgaatatgtactcttctctttcattgctttttcgttattttttacagtttatcacatttcacttccaaacaaacccgaattttctattttatatagcaggaatttccacttcaattgtctaatattatataggtttgcagaaatattcgaaacaactttggaggttttttcatggtaaaatatatatccattttaggttccacaggatccatcggcacatctgcattagatgtcgtttcagctcatcctgaacatttcaaaatcgtcggtttaaccgcaaattataatatcgatcttcttgagcaacaaatcaaaacgtttcaacctcgtattgtaagcgttgcaacaaaagacttagcagacacgcttcgtacgcgtatttcagcgaatacaaaaatcacatacggaactgatggcttaattgcggtagctactcaccctgattcaaatcttgtattaagttctgttgtcggagtttccggactacttccaacgattgaagcattaaaggcgaagaaagatattgccatcgctaataaagaaacgttagttgcagctggacatatcgtaactgaactagcgaaacaaaacggatgtcgcttaattccagtagatagcgaacattcagctattttccaatgtttaaacggagaaaataataaagaaattgagaaattaatcgttacagcttctggcggtgcattccgtgataaaacacgtgatgaaatgcaaacattacaagcaaaagatgctttaaagcacccaaactggttaatgggcgcaaaactaacgattgattctgccacattaatgaataaagggttcgaagtaatggaagcgagatggctatttgatattccatatgaaaaaattgatgtaatgattcataaagaaagtatcattcattctttagtagaatttattgatggatcagttatggcacagctcggtgctcctgatatgagaatgccgattcaatatgcgtttcactatcctactcggctaccttcttcctatgaaaaattaaatttattagaaatcggtagtttacattttgaaaaaccagatttagagaagttcccttgtctacaatacgcatatgaatgtggcaaaatcggtggtactactcccgctgtattaaatgcagcaaatgaacttgcgaatgcactattcttaaaaaatgaaattgcctttttcgatattgaaaaaacaatttacaaaacagttgaagctcatcataacgtaaaagatccttcactagatgctatattagaagcggatcaatgggcgcgccaatatgcaaatgaattgttaataaaaaagcgctaaaacagttcccactgttttagcgctttttttcacgtattcaacttaacaaatctataaccgtgtgtaactaacacttttaatatcgcataccctggaatcgctaaaataatccccataatcccgaataagtttccggcagttaaaatgataaaaatgatagtaatcgggtgaatatctaactttttacccatgacttgcggagaaataaatttaccttctgctaattgtacaaccatcataacgatgattacttttaacaccattgctggcgagtcgataaatgcgataattaacgctggtgtaatggcgataattggtcctacgtacggaacgatatttacaatcatcgctaaaatagcaagcagtacagcatatttaataccgataataaggtaaccgattaataacataataccgataaataagctcacgataatttgacctctaatatacgagctaatcgcataatgcatatcatctagtattctcattgctgctggttgtctttgctctgaaataaactttaaaaagtgattcggcaattgctcaccatcttttaaaagatagaacaatataaatggaaccattacaaatgttaaaacaacctctgtaacagtactcaaaaatccagttacattcccagttactgatgataatgactttgtaaaatcaactgtgtattcttttaccatattcgcaacattaatatttaaattctcttgaattttaccgagtaaattactttccccgaatctacgtgctgcttgttcaatctcatggccaaaatacggtaagttatcaattaatgcatcaatttgatctttaataatagggataaccgttacaactaaaaatacaaataatcctagtacgattaaatatatggaagctatcgatacgattcttgaaacacctttcttttctaaaagcgaaacgaatggatgtaaaatatagaatagtacgcctgctaatagtactgggaagaaaattgtttttaaaaatacgataaacggtgtaaaaacaaatgatatttttgttagcaataaaatattaatgaacaataacgcaaatccaagtaataccgccaaataattttgttctctaaaaaactttcttaacttatctctttttcttatatttattttctccaatgaaaccacctcttcgaatgatgaaaagcccttattcagggctcttcatcataatctatatatctatttctttgcagctttcactacaaatgatacaataaaaattaacacgattgcacctaataatgctggcacgacgtgaatcccaccaaatgatggcccaaaggagccaaataatctaccacctaacgaagcacctaataaacctgcgataatatttccgaacataccacctgggaaatttttacctgttatagaactagcaattgcacctataatagcaccaactattaatgtgataatccaccccatttttagtcctccatttctattatagtttgtatgatttaatacaaacatatgtatttatcattgctaaccatatttcactatagaaatatatttactactattttacatatggagatacatatattatatgcaaaaaagaaaaatattgtcaaactcacccataaagcaattatattcatataccatatttaaaggaggcttcattatctatgattcttaagttaaattccacttcttttgaagtagcaacatccattttacaggttcaaattccagcttataaagttgaagcaggctacttaaatagtactgccatacctcgtttatatgatactgtaaacgatattcaaaattgcgttgaaacattctatggatatttttctgaaaataaacttgtcggttttatttcttttgtacaagaagaaaaactaatcgatatccacaggctagttgtatcgcccgatttttttcaaaaaggaatcgcaacgaaactcctaatttatatatttaacatgtttccctcttcaatgacatacattgtacaaacaggtaaagcgaatacccctgctattactttatataaaaaacacggattcattacagtatcagatacaatacttcctgacggtatgattcttacgcaattaaaaaagacagaatacacaaaataatttgacttgttcgctcctttatgttattttttactttataaaaccttttgctgagtccaaattttggagcgggggaaccatttttgtagctatgctacttggggcgaatcttttttaagtagggaaactctcacttcccgagtccgacagctaacctcgtaagcgtaatgggagaggaaggtgctttttgcctatgttacacattttgcctccttaattataaatatgggatcgatatcaaatagtcacctatatttatagaaaaggagaatgtattatgttacgtttatctgatcacgcaataaaaatgatggagcaaagactccgaattgaaaaacaacgcacatatcaagcaaataaagttgtagataacttacatcacaaatacttctttcagcatattttccaaccgaaaagatgaagaaaatgtttatttaatattaaaaaacacaaggtgtgtcttacaaagactttccttgtgttttttatattctttataaaattctcactatatttaagcttgctgtaatcgcacctgctatagtagtcacatgccctacacctaacgggccattttgtaatattaatgttgaattggcactcgtcacattcacaagaagtgtatttgaaatggctggttcgattactacagttgatgtcgttacgttttgtataaaactccctgttagttgcgttccatttaatagcaatctaacagatactgtctcattcctaccattggcatccccttgaaaatattacaccttttatatgaaatgcatttttataagaaaagtacacctttgacctcatttttttaaaataaagaagcctatcatttcatctatttgaaatgataggcttctttttataaaacaatttacttcctcgccttaataataaaagtagttggcaccatcctagctttatataaagaataatatttcgtagacggctcagctagttctccatcaagcgagctcgatggttcaggctcttctattctctcaattttaaatcccgctctatttaactcatttatgtatgtacttatttttctcttatgtaatgtcgcttgtacattttctcctttaaaagtttcaaacgtaatgggcgtttcctcatgataagaagactttatagcaacttcttccgtaccatactgtaagtttgaatatactgggtgctcccaactaaaaataaaacttccccctggctttacatatgaataaatcagttccaacgtttttcttaaatctgaagtccaacctaatgcataaatggaatatacaatatcaaaatatcctttcggaatatctccttcttcttccattgctccgcatactaactttggattccaatcctttaacgtcttattcgctatttcaatttgtgtactcgaaagatcaagcccccataattcctctgccccttgttccgccatatattgcaacgaatgcccacttccacagccaatatcaagaacctttttctttctgattgaatcgaacaaacgaatctcatcttcagacgccgtatacggaccatatttaggtaaacaatccacttgaaagaaataaggtgcaactgtatcccaacactttttatttgtagctagcatttgtgtgcctttcatattattcattcccccatccatttttctttctctaatattacttacatatcataaccagatcgcccttttctcttcgccctgtagtttttcactttcgcaatcgtaccgcatgctcttcctccttcttctccagcatacataccgcaccatcttttacttccatttcgcgaatgatcataaaatacccagcgacaatctggacatgcttttaaccttccccacacattttcttgaattgacattaacacaatgcttaacacttttgtatacacattctcttcatatactggttcatatgtaatacctttcatatcatcctttatatgtacatgaaatgggtatttctctaaccatttttgcaatgattcttcgccttcaattgtcatccgaatatcttctcgaaaacctcttaattcctctatcgtatgaaatggaaactcttcatcaaaatattctttcataaagagctttatatcttcttttgtttgcagcaaatcaattggctctctcgtatcgtttggtattctccatgtatttaaaaattcccgaatatattctagttcatttggagcgttttgattcaattcaatccaccttcttcttaaaatttacttttttctgactttatgtataattataatataaagtagttaaccatcaaataattttactggttacataattaggaggatttctatgaaaagtttctcaacaccgatacgtttcatgcttatttcttcattttttatgtcttttgggtattttgcagtatacgcatttttagctatttatctattaacctttcttcatttttctgctgtccaagtaggaacagtgttgacgattatgacaattacatcacgagttatcccattattctcagggttaattgctgacaaaataggctatatcattatgatgatagccggattatttttaagaggagtcggatttatcgctttaggaatatgctctgatttctatacaatttctattttttctgcacttattggcttcggaactgcattttacgaacctgccgctcgcgctatatttggctcacagccagctcatttgagaaaaaatttatttacatatttaaaccttagctttaattgcggtgcaataatcggaccaattgcaggaggattcttactcttactcgatccactctacgctttctctctaacaggatctcttatgctgttatttgcttttattttttacttacttaaaaatcacttccaagtcactactgaaaacacgtctattacattaggaatacaggtcatcttacaaaacaaatctttccttctgttttcctttatcatgattttcttctatattatgtttactcagcttactgtcgcacttccacttcatatgaaaaacattagtaatagcaatcaacttgctacactcgttattacgataaatgcgataacaggcgtcatatttatggtattattccgaaaattattccacaaatacaacacactttcgattattaaatacggtgttttattaatgagtatttcctttttactcattcctttatttcaacacccatattggttctttatttgtgtaattttatttacaatcggtgaaacactcgtattacctaacgctgatatcgctattgcaaattacagtaatgaatcatatacagccactttcttcggattttatcaactatcactcgcatttggttttatcattggtaattataccggtacatcttttacatccaacttaagcggaatgtatacaccatggcttatttttggcggaataggacttattggttttatttcactacatattttgaatataaaaaaagtggcctctaaagaggatatacacctatgtaatacaagcgacctataacgaaaaagattcgaccatcatatgtgacagtcgaatctttttatttttcatattcaaggtgattatgtcttttacaacgaaataaatagcaagcccctatataatcagtttcaaactctaatcctggaacgtatccagatttgatacgttctaccattgttttataacaattattctcttctgtatattccttaattaactctttcttatcattttctgtccagttttcttctacttcttcactctgaacatcttctatttctgctgttttcgcttcgatagattcccgtataacttcatttatacgggagaaattattcgttttatatagagcatacacaaatctaccaatccaattaggacttttccagcattctttatatcccttttcgaaccattcaattgcttctttatagcaattcaattcaacatataaatctgctacattaatttcccctaaaaaattatcagattccctgttaaaagtatctaacttctcttttgcttctgtcgttcgttctaaatcaattaaacattttacatagctatacatgatatagtccgaatcccctgcaactcgtaaaaaaaattccgaagctttttccagctctccaagattataatgagctacagctagattgtgatatgcttcatcggatggttgaatcgaaatagatttttgtaatacttctttcgcttctgtccatttttcttgtttcatgtaaatgtcccctaagatgttataaggaaagtatgaagaaggattcaacttaacaacttctcttattaattcaagagctttatcatcattctcttcctcatagaagtacatccaagcaagattattgagagattgtacgtctctagattcatgtactgcttgttgaaacagttccattgcttcctcatatttattttgttcaaacatttcaattgccttctcgttaatgttcaaataactacctccgaagtgaataaattcatctacgctttatcattattttaagatgtaaaaattgaaatttctataaaaaatttctttatcctgtctacatttcgattgaaatagaagctaaaacacacgaatttacaacaatgagtaaatttttcaatctcccttaaattggatatacatcctgttttattttacatattatggtacaatcaaaagggtactaactaaacatttacgctccacactagtaatctagcaataccaaaatcaaaattcacatggaattgagggatgttatgaaacagaaattagctgttcttctattcactggaatcatattatcaggatgttcaactatagcagagaattctttagaaagcgggaaaggcagtatggaattattaacaccaacgatcacagcaaaagataatgaattagaaattaaaactaaaggcattgatgaaaataaagtaacttttatttatgttgctaataaaaaagtattggaacaaaaactaaaaaatggtgaatcctacaagcttaatattaaagatatcgaacacgctcataggacagactacaaaccaaaagttcaacttttccaaacgaaagatgataatgatgatggagaaatggtaaccttcaaacaagttagatatacagttaaaaactgattttaaagttgtttcattataaatgtaacgaacgaaaatatacttttaacagtagataaatgtagggggtgctaacatgaaaaaacgatggatttcttggtggattggtaacatattttggattatcgtttttggaatatgggccgctattatttggctacgagatgttgatggtgctggtgttattcaaacacctgaaattaaatcaatatcacttatcgttttattaattgcgtttatcataccggtattttttcaaattatatggctaatcattaatttgagaatgagtaaaaaaaataattatacgatttagtttttttgaattaacagatcaatatttttcataaaaaaagagaggaatctacatcaaaatagattcctccttttacatttggacttatactgcacttttactgcagcactactcctcttttttacgatgcatgttcatctttcttcttcattaacgctcttttcttcatcgccttcgttaaatatccacccttaaacgagcgaatttcatacgaagacataaacgctttcggtgcaatttcattaatgatttctaaaagctctttctctctagaacgctttgcgacgatatctaagcgataacgtatagaattaataccttcgccttcaaatactgtaacgccaaatccagagtgacgtaactcatctactaattcattacaacggtctagtaaactaacttgatacgtaatataaccaattgctaatttattctctatataaccgcctaataacagtcccgcactaaagccaatgacataggcaacgatgttcatccaatttgataaatcttgaaacacaatacctaaactgacaatgtaaatagctccttctaacaatccaacaccagcagcggatcttgtttgattctttacaagcaaaatcgtacggattgttaaaattggaacgtaaataatttgtagcacaaaaataagtagcgcttgtaacattggtatccacctctttcaaaaagtcttttgtcataataacatacataacctttagaaatcgatgggttttttaaaatttttttattatttttcatactattgaaaaacgtaaaaaagaagcgtattatatttgtcgttaatttgtttacttgtatcaaatcactaaaataaaaaaggaacccgattaggtccctttcatcatagctctatgtttttcgaagcatgttccctttgcttctcttcttctttcactaactgcatatttgcatacgctaaatttgcaatcattaaaaagtggccacctaaaatacctgtaccgaatgcccacatttccatctcatgctcaatttcatacatgatgatagcccctaaaatagcagctgcaaatcggtttaaaactcctaatccaggagccttttccttcattacgatactttttccgagtttctccactctgcgagctaataaccaaagacaataggcgcttactgctaatccaataccgaaccctgtcacttgttttccaaacggagtaatcgtccacataagtagtaaaccactaaagatcacatacaattgtaatcgatatacacgtaaggcttcttgaatcaaaatatccgctcctaagttctcattttttgtactttagaagaaaagcagcaacttacacagttgctgctttctcttcttcttgttcttgttccatcttacgaatttcaacacgtttaatttggtaagcgtctttttctaacactttaaattcataaccttccgcgtcaacatgttgtccttcttcgatttcatgattttgcatcataatccatccaccgattgtatccacatcatcttcttcgatgtgtaatccaaataaatctttcacttctgaaataagcacttttccatcaacaatgatatgttgctcgttcacatgttgaattggcggtgcctcatcttcatcatattcgtcacgaatttcgccgacgatttcctccaagatatcttcaagcgttacaattccggctgttcctccgtactcatcatataaaacagccatcggaattcgcttcttctgcatttgaagtaataaatcgtgaattggagtcgtttccatcacttcaataatcggacgcatatacgagcgaatagatgataaatctttttgatcctcggtcatatatcgaataaagaaatcttttacgttgaccataccgataatatcatctttatcttctccaaaaatcggataacgtgtgtatcgctcattttggattactttcatgtgttcttctactgaatcttccaggtagaaaccaacgatttctgttcgcggtaccataatctcttttgcaatacgattatcaaattcaaaaatgttatttacatacttgtattcagcttgattaatttcgccactttcatagctatctgaaaggataagacgtaattcttcttctgtatgagctacttcatgttctgaagctggctttaaaccgaataaaccagttatcacacgagctgaaccgttcaatacccaaataaatggatacattactttatagaacatcattaatggacctgccaataataacgttaccctttcagccttttgaattgccatcgttttcggagctaattcccctactacaacgtgtaaatacgtcataatcataaaagcaagaccaaatgttaatactgatgaaatagaaggatttaagttccatttctcaaataacgggtgtaataacttttcaattgtcggttcacctaaccaacctaatcccatagctgtaactgtaatacctaattgacaagcagataaatattcatctaaatttgttgttacctttttcgctgctaaagcaccgcgttttccttccgcaacaagctgatcgatacgacttgaacgtatctttacaatcgcaaactctgctgctacgaaaaatccagtaaatgcgattaaaatcgcaaccatgactaaattaaatatttccaatgaatccccttagttaaaaaactaaggtgtccacctcctgtatactataatgttttcttatttgtttgttagaaaacatagcccgatacaaaaattaaagaggtcggatttcacttattctataataatagagcaagtgtctgtattaaagctgtcgtttgacctgataaagatttcgatattttttcacgttgtgaatcagtcaattcatctaaaagcggctttaactcagtaagctccacttctaattgatgaatatggtctgtcacttcattcacttgtttcgaaacgtgttcattgataccgagcagcttcttcttctcctcgattttctctttaatctcacaaagcggcatatgcatttctttgcacttctcaataaattgtaatgtctcaaatgctgtttcgtcgtaatagcgataattagattgagatcgctccgcttttaagatacctagattcgtataataatcaatcgttcgtttcgacacgtgagccatgagagccaactgtccgattcgatacaccttcccaacgatcttccccccttgtttatattacatacatcatacaacacataaactgtacagtcaaacgtgacggtttattattcacaatttatacaaaattccaatctcctcctatgatgattcaatacgagtaatctacacttatacaataaaattactaaactactacctaatcactacattgtctgccacttttaacctttcttatttaaaagcatatcctactaataatgattgcttgtataggagggaattaatatgaaaaagacaatcatttctcatttttataatgaagaatacctacttccatggtggcttatgcatcacacgaaaatattcgatcacggcattttaattaatagagggtctacagatcgttccgtagagatttgtaaactattagcaccccactgggaggtacgaaattcaagatttcttgagtttgatccaactaatactgatattgaagtgatggaaattgaaagagaagtttcaggttggaaaatcgttttaaatactactgaattcttttgttgtaataatactgaagaatttttttcatctcttcatacactaggccaaaacatgtatgcgattagaatgattttaatgatagataatcataattataattattcaaagcctagatattctatccccttagtagaacagcgataccacggtgtcttcccttataacccaaatctcggatgtgcttggagatttattcacaatcatctagacggtgcatatttacctggtagacatcattcgcggcacggatatataatttatgactatccttcatttattttaaaattttattttagcccttggaatgaacaatcaaaggcaagaaaattacaaattacacctaccctttcaaaaaggggtgttcaaatgggacttcaaacacattacggtcaatctcctgaagtactggacatacgttttttagagcttagtaacctaacacaagacctccgtcataaccctgaatatcaagaattatttccaaaattcaaaccgtaatattttctgcatcgtcatcacctcaaacattttcattcacttaatcaaaaacaatctcatttgcataaaacatgaatactgtataaataataaatttttattttaggaggaaaaaatgaaagctgttattcttgctggtgggtacggtacaagaattggggaagaaacacatttaaaaccgaaacctatgattgaaattggaacaaaacccattctatggcacattatgagtttgtatagtcattacggaattactgagtttattatttgcttaggctataaaggatatgcaattaaagagttctttctaaattacaacttacacatgtctgatttcacaatacagttaaacgataatacaattactagccattctcatcgtgtagaaccatggaaagttacactaatcgatactggtgtaaataccgaaacgggtggccgagtgaaaaagattcaaaattatgtcggagacgaacctttctgcctcacttatggtgatggattaagtaatgtaaatataaaagaacttattacattccataaaaaacatggaaaaatggctactgttactgccgtacaacctcctggtagattcggttctctcatattagataaacagtctgtaacatcttttcaagaaaaaccattaggtgatggcggatgggttaatggtggatttttcgttttaaatcctgaagttttcaattacattagtggagataagtctgtttttgaaacagactctttagttcagttagtaaataaaaatgaattggccgcatatcaacattctggtttttggcatccgatggatacattgcgcgataaaaataaattagtcgagctatgggaaagtaataacgctccgtggaaggtttggtaatatggcttcatcatctttttggaataagaaaaaagtatttattacgggacatactggatttaaaggctcctggctcacccttttcttaagttctttaggtgcagaagtagtaggcttttcttctcatcccccatccattcctaacatttttgaacaaggtaacgtagcaaaagagtgcacgacaatgaaaggcaatattacagattaccattctttatttcatgccatgaagcagcataaacctgacataatatttcatttagcagctcagccaatcgtaaccgcttcatacaaaaaccctatcgatacattcaaaacgaatgttttaggtactgttcacgtgctagaagcagcaaagtccgtcgaaagcgtacgtgccattattaatgtgacaagcgataaatgttatgagaatgacggtagtggcgaccgatcgttcgtggaaaatgaccgactaggaggtttcgacccttatagcgctagtaaagcttgcgctgaaatattggcaacatcctatcaaaaatcattcttccgcactaatacccagaaactcgcctcagtcagagctggtaacgtcatcggcggtggtgattgggcagaagatcgattattccctgatatcattcgggcatatttgcacaatcatactttgtgtattcgaaacaaatatgccgtccgtccgtggcaacatgttttagatcctctacatggctatatccttttagctgagaaactttggaatgatgctaaatatgcagaagcgtggaatttcggcccaatgaatgaacctaacagaaccgttcatgatgtcattgaatctgtaataaaattatggaataacccactaacaatcatttcctcctctacaaatactccttatgaatcacctgttttaacactcgatagtacaaaagcagtaaacaaactcagctggactcctaagttatcaacagatgattctatcgcttggactgttgattggtacaaaaaatatgcatctggtgaaaatatagaatctttcacatgacaacaaatcgatgcattcaaaaatttataaaggggctataaaatggaacagaaaaaatgccgtttttgccactcattactaaccaacacttttttagatttgggcgtttcccctctcgctaattcatttgtagctcctgaaagctcatataaaatggaacctttttatccgctgcacacatttgtttgtcactcttgtttactcgtacagctagatgaatttgaatccccgcaaaatatttttcataactatttatacttcagctcttactcctcaagttggctactacacgctaaacaatatgtagaaatggcgattaagcgtttcaacttaacgaaacattcaaaagtgattgaaatcgcaagtaacgatgggtacttattacaatactttaaaaaagaaaatatcgagacattgggaattgaacccgcgaaaaacgtagcagaaattgctatcaaaaaaggaattcctactcatgtgaattttttcagtaatgacttagcaaaaaaattgccacaagctgatttaatcgtcgcaaataacgtattagcacatgttccaaacttgcatgattttgttgctggtttaaaaacactattaaaacgtgatggcacgataacaatcgaattcccgcacttattaaaccttatatcctttaaccaatttgataccatctaccatgaacacttctcctacttctcacttataagccttcaaaaaattttagctcatcatcatttacaaattgttgatgtagaagagctttcaacacatggtggttcattacgtatttttgtaaaccatctaagttcccaatccactatccattccaacgttacaaacttactccaaaaagaagtcaatcacggactcgatacattagattgctatctccttttttctaaacgagtggaacaattgaaaataaatattttaaagttttttatcaaagcaaaagctttaaacaaacaaatcatcggctacggcgctccggctaaaggaaacaccctgttgaattattgcggaataggtaaagaatttttagcgtatacagtagataaaaatcctcacaaacaaaatctccttttaccaggaactcgtattccaataaaatctccagcagaaattaaacgtacaaaaccggattacattctcatacttccttggaatttgaaagacgaaattataaaagaatgctctttcattcgtgaatggggcggtaaatttttagtgacagttccagaagttgaggtgattgagccatgaagaaagttgttgtaacaggtggtagtggctggataggtaaatatgttgtacattcacttatacaaaagggatacgaagtgcacgccacgtataataaaaataaaccctctcacctcccttgccactggcataaagtaaacttgctccgcaatgacgaagtaaaacaattcatttacgacgttcagcctagccatctcattcaccttgcttgggaagcagtaccaccagcatgctatgtatctattaataattactattggctaaagtctagtatttcattgattcaacactttacaacatgcggcggaaagcgtgttgtcgttgcaggtactggcgcagaatacgaatggtttaacggcgtattatttgaagattcaccgctcctttcctataaaaccccgtattctttatgtaaaaatgcactgcactcctggctagaaacgtatgcacaacaaacaggcctcagcatgtgttggggccgcatttttcatatgtatggacctcacgaacaaggtaatcggctcgtttctaacattatcacttccttattaaaaaacgaggaagcactatgtacacatggaaaacaatcgagagatttcctccatgtgagtgacgtcgctgacgctctcgtaacaatattagaacacggcgttacaggcaccatcaatatcgcttctggtcaatctgtacaaattaaagagttagcttctatcattgctaaaaagataggaaaagaacatttaattaaactaggtgcaatccctttctctaaagatgaacctttatttgtcggggttaatgtaaaacgtttaaaaactgaagtaaactggaaaccaacatacgatctaaatacaggaatagaagaaacaattttatggtggaaatcatttatacaaaaacataacgatatgcatcattaaaacgtaaatccttcgttcctctcgctaattccttataccattcttctaatctttccggcgtaacaatatgatgcgtacccattcctccatgcttactagcttcagaaagagtcggaccaatttgtaactttctctttctcatcgcatcattccacggactaaacccaaaccataatatacaggcaagaggtggataaatcatcgattcatgcgcagataaatgtcttccaaccgtataacttccatgctcatgattatgaataaatcttccccttctccatagtctccactcctctggtaaataaccatgaaatcgctgtttcattaaaggtattccaaagttaagttccggataattatagttaggatcatcgaccataataagcccttctagccaatacatcctacctcccaattcatctagtgatttccaaaactgatttttatcttgcatgcaaagaaactcagtcgtatttaaaatcattttccatccttgtacttcttgttctatcctcatcacttcatgatctgtcgcatatgcatcaaactctggatttacagaatctcgcacttcccaatgcggtgcgaattttttacaaatctcaacggaacgatctgttgaacctttattaattaaaataccatgatcaaaaagtttcgtatgatgcataagccaccatggcaataaatattcttcattgtaaaaatgcgaaataacggttgtagttataataatctcctcctctttctctattaatctactttttatcctacaaccaatatactcataagcaaaaatatgtttcctaattattgatcaaatattattattaatatttttgtaagttttcctttggtacccagcccttctcaccatctcttccttcgccccaaacccatccattgaattcttctaatccaatcactctttctccaatactcacatttaattctttcgcagtatattgttttataataattcctgttccattcatatctttttttataatttgctccggaacccatcctttccggtcatatttctcttcgtgacaaaacatccagttttcccagttttccggaccagcgtaactctctatcattttcactacatccccctcttctaagcgaattggattaggataattgctaacatgtgattttataacgatatatttcataacaacctccaataatcagaaaattaagttataatatcattataacttaaagaggaggaatgcacgcatgtactacaacacttcattcgaaaacgatcaacctgtaggccgtctataaactaagacgggcaatcatataacacatacactacgcctcgtcttagggaactcataataccctaaaaatagacggaggtactttacatgaaacaaacaattttaggagctatatgtttatcactagcagcaagtatatggggtggtatgtatgttgttagcaaatacgtactcgattttatcccaccactaaccctcgtttggctacgctttatcattgcttttgttgttttgtatggcattttgaaactagctgagaaaaagcaaaagaaaaaagtaaccattcgcaaaaaagattggctcctattcgcttggattggatttatcggctatttcatttcgatcacatgccaatttatcggaacaaaattatccgacgctcatacaggctcgttagttacatcagctacacctgcatttatggttatatttgcagcgctcattttgaaagaaaaactaaccgctcgtagacttttatctactataatagcgacaatcggcgtcattatcgtaatcgggtgggatattgaaattggctcctattttattggaacaatcattttagttggagccgctattacgtgggctttactatctatttatgtaaagatcgcttcaatccaattctcatccttagttattacaacgtatgccatattcttttcactcttttttattacaccctttatgatatgggaactacaaacatcctctatcggaacagtaaatacgtacgtaatattaggcgtattatacttaggtattgtctcaacagcaggtgcctttttcctttggaataaaggattagaattaatagatgcaagcatcggttccttatttttcttcttccaacctattgttggatcattacttggctggctcttattaaatgagacattaaatagtaacttttttattggcggtattcttattatatgtagcgttttaattactacttttgaaaagaaataaaaagcaggcagagattcttagtctctgcctgttcgcattattggatcttgatcgtgaaaaccaatacaaatcggtatattactttgcacttcactacgtacacttataaaactacacagcgttttagcaattaaatataaagttacaccgactgctttttcacttgtgtcaaagccatttccattatacatatctgctaattctacagaccccggcccctcaatattatatgtccattcagatgcccaatcatcgtcctcttcttcaagtggaatatattcctcacaaatataaaactgactatcccattcgttatcaaggtcatactcaaaataaatcgcttttgattcttcattagtagccatttctacagctgcatccaaacctactcgaatacttttcttatatgactctaaatcaattgctttaattcgttctgcatattctgcagacgctaacatgctacaaatttcaaaatacttcgcttctatttgctctactgctaacgaaaagacatcctcttgcatctcttctaaatactgaaatatatccacactaaacactcctcactctttacgcactccaatgcgatggacgggataacattttcggtaatttcgtatgcttatcccctttcgctgcgttaatttgaacttgcgtcagaaaaatactatttgtaaaatcagccccgcgaatatctgcatctcttaaatctgctccgataagatctgctcctcttaaatttgctccatttaagttagccgcaattaagtaagcaccccttaaatttgcaccttgtaaatttttctttttcaaatttgctcccataagatctgctccgcggtgaatgattcgtttcttacgtgcagtattcatttccttccatactaattcgctcgtttctaaaagaagaatgttcacctctgccctatgcattggaacatttattttcattaactcatctggatttaaattcgaaagtcgctctgtctcctcaattgcggtctccagctctttatgaattggctgtgttgcctttaaaagaatcgcttcatttaaataccaaagcatttcatgaagttgatgtataaccggaaaagcatcgtacatttttcttgcatgctttgcatctttccgccaatcaatccctttaaacgtaccctgagaaatcttctgcccagcaccgaaacactcaaatactgtacaacctttataaccttttcctctaagatttttatgtatactacatttaaaatctgattgtaagttagaacatggtttaccaccatctttattcactgcaaaatctaccgatgctgcgaacggtaatgcaacgcaacatagaccgaagcatttttcgcagtttgcttttaaatgatcattatgattagtcaaaatctataccccctgttgtcttttgactatttcataatattccaactgtaataaataatcaattttaaaataaaccggcatctttcgttccaattcataactttatcattcgatttcctttcaattgaaaaggactatttctatttaatgaattataattaaattataaattttctaactaaaaggagacttattatggcactagaaatgaaaacaaactgtcaaatttgcaatcaatcgctcgaacaagattctgaagcatacatttgtgtatatgaatgtacattttgcgcaccatgtacagaagaaagacaaaacgtttgtccaaactgcggcggcgaattagtacgtaggccgaaaaagaaacaataaaaagcaaagcgatatcgctttgctttttattgttttctgagtatatgaaattatatcgaacacaacttaaacatttaaaaacttcacacaaacaggctctggcacagcaacatcagattgtaaaagtgttaactttcctgtagattcatctcttgaaaatagcacaagattatgtgacttttcatttgtagcaacaagaaacttttcagtaggatctaatacaaagtctcttggccaatttccttctgtagatgtatgttccacaaatgcaagctcacctgagttttgatctacgctataaacagcgatactattatgaccacgattacctgcatatacaaagcggccgtcagaagaaatatggatagcactgccttgactattttcatcaaattgttctggaagagtagaaatatactgtaattctgtaaaggatccttcttccgagttatatgttagcgcaataacctctgaactaagctccgtcattacataagcgtattttccatttggatgaaaagcaatgtgtcttggtccacttcccggattcacagacaggctattcacttctattaatgtactatcttttacttcatacgtaattattttatctatccctaaatcaacgcccactacatatttttcatcaggagtgtaccccgcgtaatgtgcatgtggtttttcttgtctttctttattcggacctgaaccttcatgtgccataatagatgaagcaggatttacagttccattttcttcatttatttcaaaagactcaatcgttcctttatggtaatttgctgtaactactgtatgatttccactatcaacactaatatgacaaggagaagccccttctactacttgtctatttttcgcttttagttctccagtatgactatcaatggaataagcagctacaccgccagattcgccttccttaacaacagaatagagatattcattatttcggttaatcgttacatatgtagggttatccagcttagcagtaagtgttacattaccaattttttttgcttccgtgtctaaaataaacttatatattccttcgctattttctttcgtgtaagtcccaacatatccgataaactctttgttatccttcattttcataaccctctctccctatatttttcgttcatcatactttttaaaatattttatgttgaaagagtatcctaaaaaatcggagtacctctttatacgttaccatattttcttggtaaatagcttttaaacccactttttttgatacgctgctatactttcatattcttcttccaattgacgggacaagcggatatagattggcgttaaatctttatatttttccacactttccatgtttggctcatgatgaaaatctgcacctaccatttcagaaactacggataatgtatctatttcacctaaactatataaaccgaggattgcagctcctaagcaagagctttcgaaactttccggaacatatacgtcttgatggaaaatatccgccatcatctgtctccaaagttccgaccttgcaaaaccgcctgtcgcttgaatttttttcggttcgccaattagttcttttaaagcgagaagaactgtatataagttataaattactccttctaaaacagcacgtatcagatgttctttcttatgatgcaatccgagtccaaagaaagatcctcgcgcatttgcattccataaaggagccctttcccccgctaaatacgggtgaaataataaaccgtcagatcccggattcacttttgctgctatttcagtaagcacctcatatggatcttttcctaagcgctttgcaagttcaatctctgaagtgcccaattggtcacgagcccatctgaaaatcataccgccgttattaactggtccaccgattacccaatggtcttcagttaacgcataacaaaaaattctaccttttggatctgttacaggacgatttgttacagcacgtatcgcaccgcttgtaccaattgtaacagccacaacgccaggatctattgcatttacacctaaattagatagtactccatcactcgctcctactacaaaaggcgtagaaacaagtacattcatctctttggcaaactcttcatctaatcctgttaaactgtgcgttgttggaacaagctttgaaagcttttcatctgtaattcctgctacatgtaaagcctcttcatcccactttaaagattttaaattgaacattcctgtcgctgatgctatagaataatcaattacatattctttatataacttgtaaaaaacatattctttaatagaaatgaatttataactttttgcgaataactctgcttgctcattctgtagccaaactaatttcgaaagtggtgacatcggatgaattggtgtcccagtacgaagataaatttcatgaccattcatatcattctttattttctccgcccagcttgcacttctattatctgcccaagtgatacatctcgttaacggctttcccttttcatctacagcaatgatactatgcattgccgaactaaaagagacacaaagaatatcattcggctgtacactacttattcgtacagtttctttaatcgtatttattactgcatgaaagatttcttctgggtcttgttctgctgtttcaggtgtaggagaatataaaggatattcaattccatgactagcaataacagatccatcagtagaaaatagaactgattttgtactagttgtcccaatatctacaccaatcatatattttgagctcaccatctcttcctcctaacaaaaatccctacagtgtcctaatcatataagaaccataaaaatatatttattttatctattcataacgttatgtgctaaagttgtctctctcaattcatataaaaatatccttattttaaccaaacatatcgagtagtaaaacgcctccaaaagcgataaatgaaagtaacgtttctaatactgtccatgttttaaatgtttctttcactgttaagcctaggtattcttttaccatccagaacccagcatcgtttacgtgagaaaacattaacgctcctgcacctgttgcaataacgagtaactctaagttcacacctatcgtattttcaacgattggcgaaacgatacccgctgctgttgttaaagcgactgtcgctgaccctgtcgcaattcgaattaatcctgctactataaatgctaatacaattggagatagagctaaatgctcagacatttgagcaatagcattccctacaccactatcgataagaatttgcttaaatccgccaccagcaccaataatcgcaacaattgaaccgattggtaataagctatcttctgttaccttcttaatagcctttttatcgataccttgacgaaatccaagaaaataaaacgctgcaaaacatgcaatcaataacgcaatgataggactaccgattaatgtgacaatcttcatcaaagtagtagacagtggaacatacggagccgctgcagctaaaaccattaacataactggtaacaatataactaaaaatgaaactcctattcctggtaatttcgttgattttgtatttacacgaatcaattctggctcattttcaggaattacacgtttgtgaatccatttagcgaatataggacctgcaataatcgctgcaaaaaatgtaataatgagtgaatacaatagtaccttcccaaggttcgctttataaataccaattgcaactatggcccctggatgcggaggaacaaggccgtgtacgacagatagcccagcaattgctggtaatgctatcaataaaatattttgtttcgttgttttatgaattgaaattactaacggcagtaatattaaaatgcctacttcaaaaaacaccgggattccaataataaaacctgcaattaacatcgcccatggtaagttttttatcccaaaggatttaataaagaactctgccacttgcattccagcacctgactctgccatcattttccctaaaattgtacctaatactaaaatacctactaaatgcccgagaacactgccgactcccgtttcataagcactcactattttatccattggcatcccagacataattgctaaaaacaaacttgcaatcgttaaactaataaatgcatgccatctccaccacgatacccctaaaataacaattacgattgataataatgtaatcattaaaaggtacatattcatacgcagttccacccctttatgtaaaccctttcaaaattgctatacaattaagagaacctatatagttctttcatgagtaagaatttatatatcgatatacaaatcatcttcacaaaataataatttatacaaaaagaatctcccttatcagagatacatgttaactcacctctctgataaggggatttctcttccataattataatgttattgtgataaacgcttcgcgcgatcaattttcccttttttaaaagtgaatgacactttcttctcttgctgttttcacgtagtaagactacaaactcagtatccactttaaacgatgaagttacttaggatttgtcttctcatgaaaaacaactttcggaaagcaccttcactttcataacattataatttaggcgctttcgcccaatcagcagcaaatttctcaataccttggtctgttaatgggtgcatagcaagttgttcaattactttataagggattgttgcaatgtgagcacctgccatcgctacacgagttacatgatctggatgtctaacagaagccgcaataatttgtgtatctagttgatgaacatcgaataattcagcaattttagcaactaatagtacaccatcttcagaaatatcatctaagcgacctaaaaatggagaaacgtacgttgcacctgctcgagcagctaaaagtgcttggttcaccgtgaaaataagtgtaacattcgttttcacacctttttcagtaaggtagcgacaagcttctaatcctgctaacgtcatcggaagtttaattgtaactttttcatcgccaccgttaattttaatcagttcttctgcttgggcgatcatctcttcagctgtaacagcatctggcgttacttctgccgaaacagattcaactttaggaactgcctgacaaatttctgcaatacggtcttcaaatttaatgccctcttttgctactaaagaaggattcgttgtaacaccagctaaaactccaagtttatatgctttttttatatcctcaagatttgcagtatcaataaaaaatttcatgattaattccctccagtttttaaacgttgatgagttacatgtttaatatgcttatcccgtaaaagcccgatttgtgtggaatgaagcccctacttattaaagtttcactttatttcttttctactgcatgtccgccaaattcattgcgcagagctgctacaacttttcctgtaaatgtatcattgtctaatgagcggtagcgcattaatagagacattgcgataacaggagttgctgtttgaaggtctaatgctgtttctactgtccattttccttcaccagaagaatgcataacacccttaatctcatccagttttgcatctttagaaaatgcattttctgttaattccattaaccaagaacgaatgactgaaccgttgttccatactcttgatactttttcataatcgtagtcaaattcacttttttctagaatctcaaatccttcaccaatagcagccatcataccgtattcaattccgttatgaaccatttttaagaagtgaccactaccagcttttccagcatataagaatccattttctacagcagtatcgcggaagataggttcaacgatgtcccaagcttcttgatctcctccgatcatgtaacaagcaccattacgagcgccttccattccaccagaagttcctgcatccataaagtgaatgccatctttctttaattgctcatatcggcggatagactctttataatgtgaattaccagcttcaattaaaatatctccttttgataaaagtggtgtaacctcatcaataacagaatcaacaacagcgtgtggtaccattacccaaagaattcttggtgattgtaatgactgaacaagttcacttaaactagatgtacctgttgccccgtactctttcatttcttctactgcgctcgtatttaaatcaaacgctactacttcatgtttatgatccattaaatttttccctaaatttaatcccattttacctaacccaattaatcctacttgcataatataattcctcctcaaatcatcttttattaaaaatccatatcactacaatctggaatacctttcagcactgaaatgttagtatgtacagaaaggtattcacagtcatagcttaagaattcaacacattttttgtaatttgaacaacattttctgtcgtaaatccaaatagattcatgacttcagctccagtacctgaagctccaaatgtttcaattgatattacttttccttcttgtcctacataacgttcccaaccgagagatacacccatctcaagagatactcgtttcgttatagaagacggaagaacggattctttatattcgttcgattggcgatcgaataactcccagctcggcattgcaacgatgcgaacagaaacttgatcttcttctaattttgctttcgcactagcagctaaggatacttcagaacctgtcgcaattaaaattacatccggattttcatttgtttgtgttaatacgtaagctcctttagagaaattctctatgttcgctttcgtttcattaaacaccggtaaattttgacgactcagtactaaaacgactggaccatccgtttgctgtaaagcatacgcccaagcacttgctgtttcatttgcatctgacgggcggataactgttaaaccaggaattgctcgaagagctgccaattgttcaattggttcatgcgttggaccatcttctcctacagcaatcgaatcatgtgtaaatacgtaagtaacaggtaacttttgcagtgcagccagtcgaatggacggacgaagataatcattaaatacaaagaatgtacttacgaaaggttttactcctccatgaagcgccaatccattcgctgcagcgcccattgcatgttcacgtacaccgaaatatatatttcgtccagcatatgattctactgcatatactgcttcaccttttatatctgtcatcgtagaatgagaaagatccgcacttccaccgaaaatagaaggaatcgatttcacataatgattaatagcttccccacttgcaacacgagtggaaatcgttttttcagtatcaaaagatagaatgtcttttgcttcaattaaaacctcacctgtaatcgctttttctaattcatctgccagtgtaggattcgcttctctgtataagttgaactgctcattccagtcattgtctttttcaatacctttttgttttagttcattaaaatgagcttttacttcttcaggtacaaagaaatcttcctcataatcccaaccatacacttgttttgtcgctgtcgcttcttctactccaagcggattaccatgtgctttgttcgttccagcaacttttggacttccataacctataatggttctaatttctataagagtaggttgatccgtattttctttcgctgattgaatagcttttgtaatcgcatcaacatcgtttccatcttcaactcttacatattgccaatgtacagattctgcccttttctgaatatcttcagagaaagcaatgcctaattcaccatcaagtgaaatttcatttgaatcatacagtacaattaacttgccaagtttcatatgtcctgccattgacatcgcttcataagcgacaccctccattaagtcaccatctccgactaaagcatacgtattgtgatctataatagagtgaccatccttattgaacttcgctgctaaatgagcttctgccattgccattcctacagcattagcaatcccttgtcctaacgggcctgtagtcgcttcaactccaggagtatgcccaaactcaggatgtccaggtgttttactatttaactttctgaaatttttcaagtcatcaattgaaacgtcatatccagctaaatgaagtaggctatataacagactagatccatgtcccgccgataaaacgaaacgatcacggttaaaccattctgggtgattaggattgtaatttaaatgattcgcccataatgcataagccattggtgctgctcccatcggaagacctggatgacctgagtttgccgcattaatagcatcaatcgataacgtacgaagtgtattcactgctaattgatttatgttttgtgtcatagtaatcgtccccctaaatgctttcattaaagaaagtacttatttttccgtctcttgatctaaccaccatttaaatccactttcttgtaacagttcattagacgcttctggaccatatgaaccagactcatattcatgaagcggtaataagttttcctcgaacgcttcaagaattggttgtacccattcccatgacaattcaacttctctccaatgtgcaaagaatgtagcgtctccactcacagcatcatgaatgagtctttcatacgcttcaggtactcccacatccgcttgctcacaagtaaagttaatacgcatcggttcaatttctccatttttcaatggatttttactgtttaactgtaatgaaacgttctcacctgggctaatttcaattattaataagttaggtgctgcatttggattattatcttgatattgctgttttaacgtatttttaaattcgattacaatacgagtagacttttctttcattcgtttgcctgttcgtatatagaagggaacgccagtccaaaatggattatcgatccacaggcgagcagcaacaaatgtgtctatgttagaagaaggatttactcctggctcctctttgtatgctacaacttgcccgccttttatctcacctgcagcgtattgtccgcgaatgatatggctttgaacgtcttcttttttcactttacgaagcgtttccattacctttcgcttttcctctcgaatttcacatgcattaaccttttccggcagattcatagcagtcatcattaatatttgtaacatatgattttgaaccatatctcgaatggcccctgcctggtcataatatcctgccctttcttcaaccccaactgtttcactcgctgtgatttgtacattcgctatatgttctttattccaaattgattggagaacaggatttgcaaattctaatgcttcaagattttgaatcatcggtttacctaaataatgatcgatacggtatatctcgtcttcttcaaacgtgcgactaagcttatcgttaagctcacgagcagatgtaaggtcgtgcccgaatggtttctcaatcatcagacgtttccatccatccgttttatcaagtccgctttccttaatatttaaagcaatggtctcgaaaaattcaggagcaacggaaagataaaacattctatttccttttatatgtaattcttcttccctttcacgaacgacttgtaataacctctcatagtcttccggcttactcacatctaatggacaatagcgaaaattatctaaaaaaccttccagttccggagtaccttcttctctatgacgggaaaacgtctctattgattcttttattctttcttgaaaatctacatgagatacttgacgtctcccaagcccgataacggatatttgctttggaagcttttgatctctatataaattatatagtgctgggtaaattttgcgtttcgctaagtcccctgtcgctccaaataaaacaaaggtcattgattccaagttcagtccccctcttgttgtataatcctcgtcgatatactaaaaatgaattgtacagaagcccctgtttttataaaaaaacaaagagttatcaaatcccaattctttttatacctttcgctttttaattgtccccaatattaatagtggcaattcaaagcatttctaccacaacttacttatttatagaatttaacgaaacattttatatctgattacttttagtaattaaataatcttatgtctaatatattaaccacataaattattatcgtcaataaaaatgtcttgaattacatacgatttatttcgtaatacttttctaagtgtattcctagttaccattcattttcaaagataatgatcgttataataaatatcatttttatcaaaatattcaattaatttagcgctaaactcacgagcagacgttacattataaccaaaaggcttctctataataagacgatttaatccttttgtagctcacaatccactttccttaatatttaaagcaatgacatcaaatacttctggtataacagataggtaaaacatgcggttttcaggaatgtttaattctgtttcacgcctctttacaagactcaacaaatcttgatagtcctctacattcgctgtatttaattgacaataacgaaatgtgctaataaacccttctactcctgattcgtcatcagtagatcttctagaaaatatagcaatggattgttctacctttgtttgaaattccacatctgacattacccttctgccaataccgataatcgaaatagactgcggtatattttaattactaaatagtttgtataaagcagggtaaattttgcgtttcgctaaatcccctgtcgctccgaataaagttaaactttaattagccctcaccaatctggcttttacgagcagcccaactcccacctaacttctttgctttcgctgaattttgaggcggggtcttactgcccggcaaatagcgggataaacataatgaataaatcatgctgcaaaaataacatctaccctttcttcaaaaagctttacagtagtttttagaagtacgttacattatttcatttcatgcactttccccttctctatataaaattctcactaacaaaattcaaaatattatacttatttttcgtactttgctatgctataaccacaaacaggaggtataaactatgaaagcacaaattatccattcttttggggattcatctgtatttcaattagaaaaagtttcaaaaccaaaacttttaccaggtcatgttctaatcgatgtaaaagcaacaagtgtaaatccaatcgatacaaaaatgcgtagtggggccgtttcagccgtcgctcctgagtttccagctatattacacggcgatgtagctggtattgttattgaagtaggagaaggtgtttcgaaattcaaatcaggggataaagtatacggatgtgccggaggttttaaagaaactggaggtgcacttgcagaatttatgcttgctgatgcacgattaattgctcacaaacctaacaatttaacaatggaagaagctgctgctctaccattagttgcaattacagcttgggaatctttatttgatcgtgcaaatattaaacctggtcaaaatgttctcattcatggagctactggtggcgtaggacacgtagccattcaactagctaaatgggcaggcgctaaagtttttacaacagcttctcagcaaaacaaaatggaaatagcccatcgtttaggagccgatatagctattaattataaagaagaatctgttcaagaatatgtacaaaaacatacgaacggaaacggatttgaagttatatttgatacagtaggcggcaagaatcttgatcattcttttgaagctgctgcggtcaatggaactgtcataactattgcagctcgttcaacccatgacctctctcctttacacgcaaaaggactctctctgcacgttacttttatggcattaaaaatattacatacagataagcgtaatgattgcggagaaatcttaacgaaaataacgcaaattgtagaagaaggaaaacttcgtccattgctagattctaaatcttttacgtttgatgaagttgcacaagcacatgaatatttggagtcaaataaagcaataggtaaaatagttttgaaaaacgtttggtaactttcactaaataatacaaataacaaatgtttgttgttggaaaataacagcgagatcgcttcgccttatctttttcttaagaggcgtgccacaaccttaaaagctttccatcctttacaacaagtaaaaaaataacagctgaattttgaagcggggtcttaccgcccggcaaatagcgggataacattcaaaaaccttgcagaaaaattctacaaggtttttgtctataaatacaaattaatcactatattaaaatgaaagagtttgtaattcatcacaataatattaaatatacgctgctttaaaggcttgttggacagcttgtacttctaatgagtctttaccatataagttcgttgctacacgaatacaagcttcttttaattctttaaaatcagaagtcatatttaattcatccgtatttgcataatagaaaatatcaaacattttatcttctccaatgccatgtacgtttactccattatggcttccaccactagcaatcaagtaagctactttattaataatgctagagttcgtgtgtacaccaccatgatcgtggtcagcatcaataggtaagttattataatgcctataatcctctggatatctagaagagatagatgatgggtttttcatatctctaaaaatacgacctgattgttctcccattgtccaattgaactttccgttattggcatacttttcaacggctactcctaaaatatcagataacgcttcattaattgcaccagcttctcctgcgtactcaagtccagactcatttcttgtaaccgcgtgtgtaaattcatgtcctgccacatcaaatgctctaacaattgggtctccgtatactagcatagcgccattactaaatgcattaaaccactgcttaggatttcctttattcgtaccatttgtgttccaaccatgaacgacagaaattactttttgtccgttattatcaaagctgttacggccatatttttcttgataaaaatcatatactttcgttgctaaataatgggcactaactgctttaggatctgtaaaatttgtagaattacttgttactaaatcatcgagataaccccatacatttcttctataattattataatctttataattagcagtatatgtttcaattcccttaccacgagaataatctgcaagcatgtacgttccatcacttctttgtgtaattccaaacgtacgattaatacctaagtcatcttttcctgtacctgttaattttgaaggatctgttgatttatttgatgtcgcagattggacaatactactctctacttgtatacccaatttttgaacgagttcttttaatagattaccaccaaaagcatcaattaatactgtaccggatacatattcaggtgtagatgcactaaaagtaatttgatatgcgtttgtagctttatttgtattttcatctacatataccacttgtttaatttctggttcttcgataaatgtgagatcatttccatagatgttgaaaagctgtttctttgcatcctcttctgatagagtaataggttgtttcaaatcttcctgttgttgtaaattttgggcactatctcccgaaacgctcgtaagtacaccatcatcattaatatgtgctgttagttgatatccgtatacatcacgtccttcatacgtttgttgaagacgtaccaatgtagtaccatcataagatttacgactttgcgtaacattataattaactttggattccgtattaacttgctttgatgataatgcttgttctgtttttccttttagtgcatcctttgctacattttctgccgaattttgagaaggtgctgttaaattacctgttcggaacgtatcttcctttgtttccacttttaaatcttctgtttccgcatgtactcctccataaggcataatcgccgataacaccactcctgtagttaaacctacctttacgaaattattcatatttttacccctttataatcgtattattaaattaaataaatgtattttagaattttaagcatagataaaaaattttaactatagccaatcgtttttacatacctctacatacataggttaatagattggtttgctacttttttagattcaattcatttctcaaaaattattcattatataagctatctttatatttattcatatacgttattttttgtggttctgataacatatttattgccatccacacattctttttcatttctaatttttgcattggtatctcttttaaaaactgattacctataatcgcttccatttcttcatcaattctttgtataagattttcttctggattattttgcaaagaagtatttttcaatccccattttgttattataaattcattcattttattcataggattaataatagtagctttactagttaatcgtttttttatttcatcatgatagattttaattctatatccctcttttagtggaatgatatcttttacaattgttacatttgttccttccatttccttcgtataaattttttcacctttttcattaaagacctctatcgatgcatatttttcacctgcataatagctatgaggcgttttagtagtaatcgtaaaaatagctcgattttgctctaagtctgtatttaatacggcaaactggtcatctcctaatcctaggaattgaatcgtttcatttaccaacttactcactttcatttcgttaatatcaatctttagactattatctttttcttttacataggcataatacgaactgaaatggtacatactattcgttttcccacctgaaatttcaaccgtatacactccatttggtacgtcttgtaaattgatatctgttgtttcaattgttttctcttgaataactgtattcccttcttttaatttaatttttcctccttttaatgtatctatttcatttgtatttaaatggatatgcaaattcccttttagcccaagtggagcaatttgctgattcgtaactatttcgaagttggagtttatcggaatatcaggatcaactatagctcttgctttcgctaattgtgattcaggcactatataagctaaagaagtaacagccggaaaacctttcgccctattcatctctatttgtttatgattaagcttaaagccccatctttcaaaaacaggtgtaaaatcaacttgtccattctcactataatactgattcattaaatctggtaaagaatggtcaccttttttgaaagcagcattgctagctagttttcgataaccttgatacatttttgcaaatgcttcatcgccagctttttgtttcgccatcgttaaaagaataagtttttgtcgtaaatctaaatcatcataatttttattttctttcattaaagcattatataaattccgttctacctgttcctttttcccgaaattaaacaaccaaccaacttgatctgcttttttgccgtatttactatattgatattgaacaccaaatagattattagaaacttctcctgtaaatattccttgattatcaaaaccagcttggtatccatgagcgatttcatgtaaagttccccaacttagtttatctaaccacatctttgtactatctgtactattcgctgtccaatttgtgccataataggcaccgccagcaccagatatatctgcttttaagaaataacgattttgactttttttattttcaaacgttgagccatctaaaccaataattgaatcatacatcacaaaaatatcttcataatacgcaattaactcatccaatgattgaaaatcttttaaagatcttactaactctttatcttttttaggtacaaataattgaaaactctccccttgaagtaacgcatactctccatcaaattgatcccatgtactaaaaaattgagatacacttccttgttgtttataaatgggaagggggttagtagcactttcattccctacttggtactcaagtacagcgtgctcttcaccatacggagtatctatgaaaggaactaaagacgtatcaccttggatagtaacccattcatttcctacttgtatggatttttcattttttgagtcattagacaataaacgtaatgttaatttgtctttaaaattaggatttgtttgtcttacctttaatggtgtatttctcttcaaaataaatcctaaatcttgtcggtcatgatatttccccttacttatgcccgcctgaaatatccaagtaggctcttctaaactagtaattttttttgcatttattcgttcatcagcatgtaagtgtatatttcctatgaggaaaaacattgtatacattaggcctataacaagtaaccttttcatttgcatatctccttctctatttttttatatacaaaatacaataaagccctccttcttcacttataattgtcgtcaataagttacttatcagtgtaattattatagttacattaactcgtgattatcaatcattaaatgtatgtaattttgcatatatgaatattttgtgataaattccaaaatatcgtataattatcaatattttttcagacattattcaataaaaaaaacacgaagactcttaagtcttcatgttttttatacatgttattacacttgtgattgaattaattactaaaatctttttaatcgtaaaaaatcaattatttttaggctgatagccgtacctaatcttttacaatttacttattctttttgttctgtaatattaaattttgaaaccaattccgttaattcttccaccttttctttcattttgttggattggattgatatttgttcaattgatacggcctgtgattgaattgaatttacagtttgaagagtctcctttttcacatccgttgcagtttcagaaactagcgaaagagaagcatttacttcttctgtaccagcagacatctcttctgtcgctgcggatacttcttgaatttgacctgtaatcttatcaatatctctcataatagacaagaaggtttgattcgctttgtaagcagcttcttttccttctactgccttttgttgtcctttttgcatgacattaactgtatcttgggtatctttttgaatggattttattaaatgattaacttcttttgcagattctttagattgctcagccaagtctcgaacttctgcggcaaccactgcaaatcctttcccattctctccagcacgtgccgcttcaatagcggcatttaaggcaagaagattcgtttgttcggcaatattagtaattgcagcgagagctgtatcaatctgttgtgtacgtgtaacaagtttatttattacttttgatgtttcctcgacaacatcatgcacactattcatttgaagaatagagtgatttatcacttcactaccgatatttattcgttctgtagtcgttactgctacctcagcgactactgctgaagattcagctacagtttgcaccccggttgtaatttcttccattgaggatgagctctcctgaatactagttacctgtccttctatttttgtttttacttctaaaacagtctgtacaacctcatttgaaatactagacgcttgatttgtatcttgtaatacactctccgtagtaaaaataacctcttgtgttgtcatcttaacattcgcaattaattgttgaaggttatctaacatactattaaaagactgaacaatatgccctaattcattatttgctttataaggagtacgtgttgttaaatctccagctgctactttttccatatcattttgtagtaatgcaagtggttttcggatagttaatttaataacatatccaattaatataattattaaaattgctaaaatcgaaatactaacaaacattatcattgtattttgagcactattattattttccttctgtaaaagctctgcattattactattatataaaatcaattcacgaattgattttattgatttttgcatattaggttcaatctcttttagataatatgcatatgcttcctcattattagacttccctaattcttgtgctttcttcatttgagtccttaattcattaaatgtttcatgaaacgtgttatataattctttttctttagtagaaataagtttagcctcaaactgctttaaaagatgatcattttccttacgaatcccatccatttctcttattaattcgttcattcttttttcatcttttgataacattatttccataaagttcatattaacgtgataaaaattagattctacaattccaatccactcaattggcagtaaattatcctcatacatattagaggaagtacttttccctctttctaacccccaaaaccctattagggataatactatacatgcaatacttgatatagttattaatatgtttagttttgtaccaatcttactgtttcttaataattccaattcactttctccattctaatatatagtttaagtaatgtattttataccaagaatccaaaaattacgatgtttattttgtaatatgtaattttgcatatcgtccactactgattcaaaataacctaacattgtaattttcgttttccaaaaattcatgatcatgaacacatctcattaattcttgaacttcttacccaaaatatccgcatatactgtggcaccagggaaaaccatcactggtatgatatataaattacgcttccatacaagactagcttaaaaatatttttcttattgctcatttttctattccccctctattagaagtactcctagcacatcacactaataaaaacgataatattaaaaaataaggaaagacataatacgtatgtctttcctctaaaattgtaatactcaatatgctcttggctctatttgattttccatttaaatcctcacatatctttctttataatatctcctaactccatccaatttgtaatacgcgggatattgagatattgattgtaagaagtagtttttgcatatacatttatcggttttcctattaacgtttctaaaacagccggcttatcatcaaagaaatagtttaattttatttcttgtataaagtgtattttttcttcatccttcattccatagaaaaagcgatcttcatgtaccggaaatcctttttctattaaccatttttttgtttgctctccatgctctttaggtcgcgccgttatatagtaaatttcatgtccctgtctttctaattcttgcaatgtctctacagcatacggaaacggtgaacaagaagtataataaatctcatccagcaaactattccacatatgaccgccttcctcggaagtcatgccaaatgcttcatgaatttcaattgtttttaaagaatggaatacatccaaccctacttttttgtttaatttcttattatataaatgaaaagcatgctgccttaaatcaattagtgtatcatcgatatcaaatccaaacttcactcttcatcgctcctttctgcaatccatttatcggaacatataagtagtttttattccccttattgctcatctttccgatatgctggatagccaataaatctataatcttttccaatctgggtaaatgatatatccttaaattcaattgcatctttcattttagtaataccagtcccctctacaaaactaggcgccaatctacctccaataattttaggtgcgaaatataaaataattttatccattagtttattttcaataaacgaagcatttacttctccaccaccttcaataagcagggaggaaactcctttttgtcctaaaacatcaagcatttcatgtaagtttatatgcttttctccgctagtaacaaatactttaactcctgcattttctaatgctttctttttttcctctgcatgattacttgttgtaaatatccaggtaggagcttctctatctgtaacaacgttagcttccatcggtatgcgtaatgtcgagtccaatattactcgaattggatttcggccatttggaatacgcgttgtcaatgatggattatccttttgaacagtattcgctcctactaaaatagccgcattttcgtttcgtatttggtgtacttcttgtcttgcttctgtagatgtaatccacttactatccgataaagacgtagcgattttcccatctaatgtaactcctgatttaatcgttacaaatgggcgctttgtcaaaatatatttattaaagacttcattcatttttttagattcttcttcacacactcctacaagtacttcaatacctgcatcttgtagaattttaattccacgtccagaaacaagcgggttgggatcaagtgtagcaactactaccttcttaattcctgcttgtacaattgcttcagcacaaggccctgttctaccatgatgagaacaaggttcaagagttacataaattgtaccaccacgtgcctgttctccagccatacgtatcgcatgtatttcggcatgtggttctccggccttcatatgtgctccgacccctacaattcgattatcatttacaattacagatccaaccaatggatttggagtcgtttgtcccttcatagccttggcattttctagtgctagcttcatatacaattcatgctcaagcatgtaagtgtcccccttcaaaatgtccagaacgctgaatcttcgtttgcaaatatttctcattaaactctgagacatcaccccataacggttcacgactcgtaacatttaatccagctttttgtaacgcttctaattttttcggattatttgtaataagttttacaggttttgagcgtagcgcttttaatacttcaattgtatcatcatagtttcgaacatcatcttcaaaacctaggttcagattagcttctactgtatctaacccattttcttgcaagaggtacgtcatagctttactaaacaagccaattcctcttccttcatgattcgctaagtaaaataaagcacctgaaccatgttctgtaatcatttgtaaagactgctttaattggaatccacagtcacaacgtttactaccaaagatatcaccggtgtgacaaatactatgcatacgaattagggcatcttcagaattctcaaaatcaccatatacaagtacactagattgctgcatatcagctaaattaatagatgagagtttttcgataattccttctacactatttgtaacctcactacattgtaaccaagaataccattgaaaaactttagtctccccatataaattaattggcaatttgataggacctactaaataaatatcctttccatcttgatgtataaattgaattttatcttctaacatatgaattgtatctgttgtaaccattaggtacctcctagtatagagaatctctaaaattctcttccattgttatattttttattgtttaacttacacaacgtaagtgtttttacagatgctattcttttttctctcagcttatatgcaatatgtatcattacaactttggccatttaaagaaaagagttttagttacataaaacaacttagttactttatgtaagtgagtatacattcgtaatcaatttacgtcaagtaattaattataaaaacatttgttactaatagtaagatgttatataatttattttaggaggtgaaggaaaatgaatgattctacattatgccctcgctttgaaaaaggaatgaaattttttagtcaacgatggacagcactaattatttaccaacttttttctggatctcagcgcttttgtacacttgaatcttctcttcctgttagcggaagattactttcagaaagattgaaagaattagaactagaaggaattgtcgaacgtaaagtctttcctgagacaccagttcgtatagaatattctttaactcaaaaaggatttgctttagaagctattattcgcggaatagaagaatggtcacaggaatggatagaacttgaggaataacataaaagctttttcgtatatagttttaagtaatcaaattacagatacctattattaaaacgctaatttttcaagcatttatgaaaagctagcgttttttaataaataaaatgtaagaaataaagcaaggtgatcaaaacgatcaccttgttcccttacagattaaaatagtgttttaaaatcttttattcatacatactcgattaataaaaaaaacgaataagcttttttattaataaacagttttatttttacaatacagttagcttcccctgctatttgcggacagtaagaccaccactgattaaatttctattttattacattcgaatattacttatgaaatttcacacgctcttcaagtggttggaattctttttcacctggtgcagctgttggattaccaaatggcatttgtgcaattagtttccaattagcagggactttccattcttgttttacctcatcgtcaattaatggattataatgttgtaatgatgcccctaatccctctgcttctaaacctgtccacacgactaattggtgcatacctgatgcttggtgtgaccaaattgggaagttttcagcatatgcagcaaacttttcttgaagcgatttaacgatagcctcatcttcaaagaataatactgttccataaccagctttaaaagaatccattttttgttgcgttcctgaaaagtctccatctccaactacttttcttaatgtttcagtggtaatatcccataatttatcatgagcttcaccaaataatacaactaatcgtgcagtttgagaattgaaagcggatggagtatatttcacagcaaactccacgatttctttaattttttcatccgatacttgtacctctttattaatcccatagtaagtacgtctttctttcagtgcagtatagaaatcttttgtcataattccgttcctcctaagttttaatattcttcaaaatgatacatctcgaagatagtatgcgtttaaatgagttcatttttgaatcattgaacttcctagcacccattgccagtcattctaaatctaaacacactgcttccttcagttttcctaaaaaaagccttataacatcattcataaaatctaatcatcattcggtactattttacccattctctattcatgtatcctgcttgtttcatatttacacaaatatgaaatgtagctactttaatcaccaaatttcacattaatttagagcatcttcaattacagcaatttcgctcactcgaacaaaacgatgcaatttaaagaacattgcaaaattaagtgctacctgtaaaagaaccctcttagccgactataagaaaaaataataaaaagccaaaaacgaacaataatatgttcattcttggcttttacttaaccatcacatttatttttactattgcttcaaatgatttttaactgcccttattaccaattcgtgatcttcttctggtggtaatcctgaaactgttatcattccaataacccctacgttttttattctgataggaaaacatccaccaaacgcagcgtattctgaagtatctaaaagatatttttcattataggagaccccagttatttcactttgtatctgcatataatacgagctacgatcatgcagggaaacgactcgttttttacgctcaatccatttcgtattttcctcatttgtccctgtcatcttgaaatgaaataattgcacaccatttttcgttatatcaacagcaatcaatttcccctcttgctttgctgtttcaacgataaataaacctagttgcaaggcatcttcatttgtaaaagaggaaaattgaagtgtttcctcctcttttaaaatttgtttacttatttcattcaaatttgaagtactcatatctttgtcccccttactcactttatgccagattgctacttttaaaattatgcaatcctatcgtgcggtctttccatataactaataccgtaaagcgtattcatttcttcttggtgctattatgaattatatttaactcattaaaaatgtatgtcctctagtgctaaacatttcgtatagaagttttcttccgaatactacttacaaacataaaaaacagttgattgagcaaccggttcgctaaaagtttcatatgggatattcatttaaccaaaggaatgcttgttcataatcatcaaaaaattacactcaataaagcaaccttatgtacgaaaagagactatggaaaagatgaccttttgtcactcatttaaaaagggacaaactctccaaatggagaagcctgtcccaaaatcgctttattttattttgcactagaactaacaatcgtgaattagaataatgacttaatacttgctaagacagtaagtacacctacaataataacaaatacgttactcattttccctttgtatttagctagtactggaactttttgaatcgcatacatcggtaatagacataagatagcagcaactaatggaccgcttagagaatcaataagtccaagaatacttggatttgtataagcaacaaaccagcatgataatacaacaaaagtaaggattactgtcttaattgttttttcttcaatatcttttccacgtgatttaccgaacttaataatcatgtcacgcattacttcaaatgctccgatataatggccaaggaaagactttgtaatagccacaaaagcaataattggagctgcaatagtgattacaggcgaattaagctcattagcaagatatgaaagaattgataagttttgttcttttgccatttttatatcatctggagtcaagctcaatgcgctactccaaacgaagaacataacaacagcgaatgtcatgatataacaaaccttttgtatttgcgcacatttagcatcagtggcttcgattccatacgtagctctctgtttcacaacaaatgatgaaatcataggtgaatgattaaatgagaatacgatgattggtagaatcatcaatatcgttccaaaatagcctgttcctgttgaagcagttgaaacagctgaaaaactaagcattgacgtattccactgtggaattaaagatattgcgataaaaagtaaagaaactatgaaaggatacactaacatactcattacctttacagtaatatcttgaccaaaattcagtatagcgataagaccaagaactaatacaagtgataaaatagctcttggaggttctggcatgtgcaattgatgcacgataaaactacttgcagtgtttgtaagcgcaaccgaatacattagtacgattgtataaattgaaccgaaatatacgatgttaaaaatgatactcgctttatttccgaaatactctctaattgtacctgtgatcccctcatcagcagaattagaagcgtatatcattttagcaagcgccctatgtgagtaatacataactggatatgcaagtaatgtaattagtagtaaagataataaaccacctgaacctgcattaatcggtaaaaagagcacccctgctccaattgcagttccaaatagactgagtgcccatgtagtatcctgcttatgccactttttcggatctgcatattgctcattttttcgtgcggtattttcagcttgaacttctattttctttgcagtattcccgttcatataataactcccccttgtatctattcctgcatctctctttacacctaacaaatattcccttttcggaaaatgaattccttacaagttgccccactttgtatgtccttcatcataatgaatccaaattgaaacattcgctagttagcgtcctaatataattgttagcgttcacaaaaaagtttactcgtaatatccgctctttatataaagacctcttaagagaacaatatagaatagacttcataaatacgttgcaacatttctaataacagtgtattactttaatggtttctcttttttacttttaacagtaattttagataaaccggcctctcttcatttgcgaggcatttctttctcaattctatacattaccttcataacttcggtagcactgatgatactgcttacacaagccactgaagcacattacatacatttcgcctctaatcacacacctttcttactagtaatcgcattttttatattttctccagagataataaaatttctctcgacgccctcattataacgtgtatatttataaaattaatatttttatattttcagaaatattaaagtgcaataattttatatggataatattttacagttagcatgtagccattgtttttatcgcttaaagctgaattagttagtaaaaaaatacaataatacattgttgttctaggttactcattataaagatacttatatcccctttatcaaaaaatttcattttaaacataaaagatattctaataaataattaatgtaggtaaaaagaaaaaattccaaaataaaaaaaaaccaaattttaggatatatattattaatattgaattcatatacattttaaaaagatacactgagtaaaaaacaaaaaagctgccccatatggacagctcatttacataattatcgttatcaggaatatctctatgtttgtaatgaatcgtttttacatcatttccttttatgcgaaaagtaattgtgtcctctccataaggcggattgtgtgcaccctcaaaagtttaaattttaaaatccctcattaactagctcttttatcgagtttaattttgaagaaagctcgataaaccattcttcatcccctgttaataatgcaagatctataagataaaggatttgttccttatttattacctttgattcagggagtttgttaacgtgtttactaaagagtaaaatcgcttcgtttattgtgtactggccgtcacgtttcacaatactaactgtaactatatcctctacatcatcaagtgatacaatataaccaactattaattcaccttcatttgatattccacgaacccaatctcctacttttaaaacatgattattatttgacatcataccgtttcaccttcctataaatattttttgtgacaataaaaaagatataaaaacaattatactgtaatatttttcattacatttaagtgttaagaactcacggctatataataattaagccgcttaacgctcttgattgataaggtcaacaacttctttcattgtataattctttaagtattcacctagatgctcttcagcacctaagaaaatagcgaaaagaacttttcgcatgttcgaacctacaacacactgattgtttgattctggacacttcggctgcaaagcaccttcagaggttatctgataaatatgccaaagattaatttcatctaaatcgcgagcgaaaataaaaccgccaccagtcccctctttcgattgtataaacttatgtttttttaacaaacttagtactttgcgaatgcgtactggatgtacacctgcactttctgaaatagcattacttgttgacatccgatctggctgtaaagctaaataagttaaactgtgtatggccaaggtaaagtcgctgttcatgattttcctcctacgatcaaaaatattgtttctcatatattaactgtagccataaatattacagataggttagaacgttaaaacatatagaatacttcttgccataaaaaattaattctcttatattctatccggtcccacctatatctgataacttcatttagctttttaagttgaaaataaaattaaacactccactgtttcttcacttgttcttctgccaactgtttaatttttgtccaaatcgtatctttactcacaataacatttgtttgataatttctatcattataattaactgtaacacatacttcaatcatcttctgcttcctcctttcaaaaaactttttctaaaaatactacttattaattggccaatttttgcaattcaatgttcaaaaacgttcgaacgctacgtggtaaaaatttacgaatttcttcctcattaaaaccaatctgcaatcttttctcgtccagcataattgggcgtcgtaacattagtggatgctcaattattaatgtataaaattcatttagcgagagctcatcaatatttatatttaagtcctgaaaagttttggatctagttgaaataatttcagtagccccctcttcagttaaacgaagaatcgatttaagctcatcaactgtcatagaatttgatacgatgtttttttcaatataatcaatttgatgctcttcaagccatgctttcgcttttcggcatgaggcacagcttgctgttgtatatagaattaccatatttaactcactcctttaatgttatgaaacgtacattttaaacatcggttattgaaatgtattaaaaaaaattacagtttagaatcaaatacaagcaatattatttattcgagaatatttaatttatctacattttacagacgataacaactcacttctaaaaactatactgtaattttaaactttacagttctataaatcaaatgttaagtcttggattcattctattaacgtataataggagcagttgagacaatacttgcctcaaccgatttttatatctctttataattttttgcagtaatgactgtttcaaactcaaaggtttcgggtagatgatctgcataagaatattcaaaagttcgtccatccgttaaataagctacttgttcaactcgcattaggaaatcctgatttgttaagttcataaactgcttttccctatcatgtgggcgaattcctttaaccctgacaacagatgtccctacttcaagaccaagtttattttgaatatgtgagtatatcgactcctctaaaacagaagcctcaacacctgggataaccgaaattggcatccatgtatgctccataatcgtcggaatgctgtgaatgatgcggaggcgaatgattttatagacgaaatcaccgattgaaactcccaatttctcagcaactacttcatcagccccaacaatcgcaaactcgataattttactttctacctcactgccgtatacagctttcgtacccgttaaagtttgaatcattcgtgccttttcctgttgacgccaatcttgcaccactgttccacttccgcgccggcggatgatgtagccatctctaactaatagatccagcgctttcttaatagtaagggctgaaacaccaaattcttcagcaaggacggggctactcggaattttttcgttgattttatattcaccatctaaaatttgctgtttaatcttttgataaatgccgaggtattttacttgtgttgatccgcttgccatttccatacctcctttatactgcaaactctcttctattcattcaaatgtaaagcctcaagtttgtaaactgaaggtgatggggcagcaaatccattttctaagatttcaatattcgttaccgcttcttcgtctttcacaagttttggtgcaccatttataattgtttcatacgcggcatcatagaaacgaccgtaatcaccaagtggcgttttaatttgtttttcaatccagtcaccatttgcattacgatacttagcaactccatagtacatcggtgaatcttcaccaaatcctgcactctcaggcataacacccgctttcaaatcattttcctgctgatcttcaccatatttaataaatgatccgtttgttccatgaacgataaagcgtggataatcttttgctacgacatggttcgttttcagcttaatcttcaactgatttccgtaatgtaaaccaacatcgaaatagttatcaaccgcaccttccatttcattattacgaatatcgtatgtcaccgtatctggacggccgaatagtgaaatcatacggtccatcgtatgaatacctaaactgtaaaatgaaccttcttcttttggagcttcatgagtgattgaaccaggacggaaataatcaatatgtgattcaatctcaataatatcaccaaggaacccttgttcaattacttgcttcacagctaaaaaatcaccatcaaaacggcggttttgataaggcataactactacacctttttctcgtcctaaagctaataattctttcgcatgttccactgtatcgcaaaatggtttttcaacgataactgattttccagcaagtataacttttttcgctaattcgtaatgcgtatgtgctggcgtacagaccgtcaccacttgaatttccttgtcattcaacaattcgtccaaatcagtagtgaagtaaacacctttttccttatatggagccgctaatttttcatttatttgacgtacaaaaatcgtttttatttttatattattacgcgtgtttacataaggtaagtgatagcggttagctgactttccaaatccaataaagcccattgttaatgtcatatttttcaacttccttgctcataaattttcgtttctatatttattatataatttaattattaaaagtatatagttttaaatttataattatatattaaataaaaaatccacgataaaattcgttctcactataagttatggacctataaagtgaaactttaatcagtggggcgatttattctctactgattatttacccgtaaataccgagatgaaaaggagcgtaatgaacatggcatatactactatatctatggaaattttcggatcaactgaacaagtatggcaattaatcggaggtttcaactcccttccagactggttaccttatatacctagcagtaaattaactgaaggcggtcgtgtacgtcatctagctaatccagatggtgaaacaattatagaacgcttagaagtattcaatgataaggaacgctactacacgtattcaatcatgaatgcaccgttcccggtcactaattatttatctacaatccaagttaaagaaggtactgaaagtaacacatcgttagtagagtggtctggtacgttcactcctgttgcagttagtgatgaagaggcaataaatctggttcatggtatatacagcgatggactgaaagcattgcagcaagcatttctagattgattcatgtaattgattgagacgaaaaagttaattaacagtcaaacattcgactttgtggttaagttcattatgaaagataaacaaatacaaatttcatgcctgcttgttaatgacaagaaataaaaaatactacctccaaatggaaggtagtatttttttattaatcaggaaaaacaattaatccctcttctttttcttgctgttttaaatcttcttctgggaatgttacagttgaatttttatcccctgttttttttgtttcttcacctggaaatacgaaagttgaattttcttttccttcatttttttctacgttatctggaaataccatagaatcattggtagttaaatcactatgaaaaccaaggttagacaaaatcgcttttaaatctggtaaaacccctattttatcagatgatgggtcattagattttgtgcctgtattaggattacttaaaattgctctcaattcttttggtgtatatgccttacctaaatgttctttagcaatcccttgaattgatacagcagccccagcgattataggcgaagcgctagaagtaccacggaaattagaagtataacgattcattatactctgatctgtaactttttgtcctttactattttgattttgatatgtatctaatgtatcaacatactctccccaaccatatacatcaattctactaccatagttagagaaacctaaacgtttatgaggaactcttgcagtagatgctccaactataatagctcctgaatctttaaagtctggactatttcgatttaaaatctgtttaccattacggtctttaaatttatctaaatcaatcccaccattaccagctgcttctacaataataatacctttatctgtacctttacgaattgcgttaaatatactcgggtatacttctactggtaaagggtcatctccatatccatcatatttaaaggattcttctattaataaaacatctccagcctgtaaagaatctacggcacttaaaatagcatctcttacatcgattctcccattatctcggatcactgaaattacttttgcctttgcttttggtgcaatcccaatgttcccaatcctattgtcagctgcagaaacaacacctagaactgaagtaccgtgagaaagatcattactcatttttccagacataaattcaatattttgaccgactaaatcttcatgatttaataaccagccttcttccaaatctacaaaggttgctccttgaccatctcctcctttaattccccaagcataaggagcattaattcctaaaggtgcctcttcaagatatccctgtctcaaaaatctaggttcatcataaggattgattgataatacaggcaatctcgagctagttgttgtgtttatactcttattagaacgaaattgtattttactagaatcgttattggcagcatgtactgtatttgttacaaatgtcgtacctaccccagcaaaagttgtaattgcaagtgatgatatcaacatacctttaaaatttttcatctttccacctctagttttctattagaattaacatatttaataatgtgtatgaaccgaaaagctttttatcttattataaaaattaatagatttttataactttttgatttacataaaaactcctttcattcttgtaattcaatgtgtatatttcaaaataacaaactaactgtaactattatagttacacctttattgattttcaactacgaaatataaatttttaaaaataaatttatattactttaaaacagagctaaccttttacgcatataaaaaaaacaaaatatctgtgcaaattacagcggtgaataagtttatagactgcaaaaaaacaagaaaaagcaaaacactaagtgctttgctccttataaaattccttttaacttttcaccaattaacctcgctacatactcatagccttctggtccaaagtgtaatccatctttttcaccattttctacaaatcttttataatcccgttcttgaatcatttcagcgaatacgtttagaaaataacttcctgtttccctcgccactttctccaccacgtctgcatactgaccaagcactctatttgttctattacgctgtttttcttcatcaactggtgcaggactaatcagtagtactttatctgatgaaatatggttcacaatcttctctaagttttctttatatgcttgtaatgacacttgagaaaaagaaaccgcatcattcgtaccaagaaaaactgttacgaaatctggtttatatgatattacatcttcttcaatcctatttaacgcatcgaatgtattatcccctggaacacctgcattcactactttccacttcggaaacatctcttgcaaacgtggtgttaatctcggcattccatcaaaaaatgtttcatcagctgtaatactatctccaaagcatactaacgtttttattaagctactctccttttacgtatgaaacaactttccttctattgcttttatatatctttcagcagaacgttcaactgcctcatttgcattttcttttactactcgatgaaaagcattgtataaacgattaaactgtaacggcttcactcggttcaccatttcttccacttttctcgctggtaatggaattaagtttggatagctatacataaaacttacccaccgctcatccgctacaacttgaataatatcacctgttaacaaaatcccttttccatcattaccttcttcccaatgcaatacagaaccaccactaaaatgtcctccaagacgatgtacagtaatcccatccgctaattgtaaagactcaccagaccaataaataatacgactacttgggcgcatcacccattctttatcatcttcgtgtatataaattggtacatcaaatgtctctgcccattctacttgcgttgaataataatgaggatgagacaatgcaatcgcatctaatccaccaagctcttttattttcgcaattgtcgtttcatctaaatacgtaatacagtcccatagtaaacgatatgactctgttttcactataaatgccgtttgaccgatcgcaaatcctggttttgtcgtaatactataaagtccattttcctcttcgattattacatttttatatgtatcatctgtttgcaaattttctaaagtcgtccaagactgccctttcggattcacatattgcctctcttcatcacaaatatgacaactcaccggttcctctacactcgctgcatactgcacaccgcacgttgtacaaacgtaatttttcatcataattccccctatccctatatttttattaaactgatttttgttgataataatctacttttttattttcaattaataaacttataaaagtaagtaaataaacaactgtaactgacaatggaattacagtaaatcctttttcgcttctgcaacattcatctcactatctccccaaaaatatttgtgctataaagtcacctcaacctcacccatccaataacgccaagctgctaaataatcttctaaatctttcgggtggtgccgtaaacacgtatctatacgcaaatataatcctatgactatttcttcatataaatcacggtcttttttatgaaatacacattgtttcatcgcataatcgattgtttcttttgttaaatcttccggggttgaacagaacgcataaattaaatcatatataggatctcctaacactggtaaaggatcaattacaccgtgcagtttattctcttgaaatataaaattatgaaatccaagatcaccatgcaataaaaatggctgatttattccagtccccctacttggactatttgctaacttaaaaaccgttctatactcttcctcacttatgtaacgtcttacattttcatgagcttccatcacatttgtcgttaaaaattcattccaagattgaactgggctttctttccatccccagccatcaacctctgtagctacttcatacttattgataacttcctttacaagtttactaagaacactccgtttatggcctagtttgcaagaagttgtgccctcaaggaatgagtaaacaatatagcgatttaaaggttccttatataaaagctttggaaataattcgtcctttttataaaactgaagaaaataagcttcttcacgtatgacatccgattcattcaactttataacgtattgttcatctaacaaatatatagtacttgtcgttcccccgtttaatgcttttacgctatttggataatgtgaaataactttttccttaactagttgtgcagtgattattgaaatgtccattctctcacccttcaactccgaatatttccttaattcaaaagacaactttactatcatttgacaaacaaaagtaaaatcctttcaatcgccctgatataacaaacaacaattttattttattacaatgactttcttcaatattccatttatgataacgtgattttatcactctaaatgctcttcatatactctaataatttctattgcagggtctctgtcttgtaatttatgagccaaactttctacaccaaacacttctgtaaacgtatgactacctacaattaaattaattcctttaaatttcgcatgttgcactgtatataatgttttttcacctgttatgtacgtgtcacatcctttttctaatgcacgttcaatcaaatttgtattatttcctgcaccggttaagattgcaatccgttttactggtttatcgtgatttctccagctcttcactttctcttccattttttcttcaagttttccaactaagtttgaaaaaggaatggcttctttatattctcctattcctggtagttcttcttcctcataggttgaatattccagtattgtatctatcctaatttcgttaaataacgatgtacacgtgccaaactttacaaaatctaacggcaaatgaatccaaaaatgattcatttcatattgcttcaatttctcaatacatgcctcttccataccaaataaaaaactccacggcgcatgatgtgtaactatcatatcgactccatttcgatacgcttcttcaatagtttctaacgttaaatttgttgtgtaaccgattttgtgaaattcatctttacttatataagtaaaaccatattcatcatcgccatatttatgaagatgctctccaaatagtgatgttatatgttcattaaattgctttatattcatttttatttctcctttcatttacttttatatttcataaataaggaaatactaaattacaacgttacatacatataggaggacaatatgaaacctgaatttttaaaagctgtacatgatgcaatcggaaatgtcgaacacattcatatagaggaaagcggtgctgacagcttacttattcatcatgatgatgcacagcagttacaacaagttgctaaggcgttagaaaataataatttccgctccgctttaagaacaactggaaatgcttcgtacattgaagtattgaacagataatgaaagtccggatgtattccgggctttctttttatcccgctattcaccgggcagtaagaccccactgattaaagttccactttatattgaaacttcaaactctttcacatacaccgctgttccagcaatatctatttgtaacttttcgttttctatccctttcgttacataaacagttacacgaccatctttatttatttcctgtccttgctcaacgattaaacccaattcatgttcaaaacctttctctaaatactccacataatacgctcccattacacctgaagctgttcctgtcactggatcttcaatcgtcccagcgtaagctgatgaaaaatgacggccgtgcatttgtgctagttcatcataagtttctagacaaattgggtgaatagaagcattaggtatttcttttaatactgatggaaatgcagcattattaggtttcattctctcacatgcattaagatttttaatcggtacaattacagtccaattaccggtacttccatatacaatcggtaaacttacatctaaatcatttacttctaaaccgatactatgagctaattcttctgttgaacctgtaaattctttaaactgaggtgctgcctgtctcattttaataaaggtttctccattttcatttacacctatttgtatcggtaaaatcccagccttcgtttcaatcgtaaggttacttttctcttctaataaacctttttcgcgcaaggcaaatatcgtccctactgtcccatgaccacataaatccatttcaaaaccaggtgtaaaatagcgcattcttatatctcctacttctgtggaaagaacaaaagttatttcgttatatccaactttttcagcaataatttgcatttcctcttccgttaatccatctgcttctaatacaatacctgctggatttcccttatttggtttattcgtaaatgcgtcgtaatgaaatacatttatagtcttcattttcttttctcctaaccttctttaaagattttataatacagctctatctccgttttcaacgaacaattatttctccaaaatatcctctgcatcttttcatttgaagtatgtgtgcttccaatgtaataagtagcccctatttcctttaacatatgcaacgattgaaaatgcatatgggaagcaattcctttcccccgataataaggcattaccccaaaataaaataaccgtccttcactttctgttccagtttctatatgcggtatggacataccaatcggctcatttttatcataaaaaacaatacatgacttttcccagcccgtacctaactctgtttgcactgaataaaaatgttcattgatagttaaaattgaagtttgattccctgaacccgacatacattgttcccaaatatatttaaattctttttccgataacgttccttctgctattgatcgatatgtatattgtctttcaagcttttctacattattcaattctctacatacttctatctttgcggcatacaaagaaaaaccggcatcaagtaacactttcacacttgagttataactactaaaccttttgtttaatacaatactcgctctttttaactcccaattaaaacaaacctcttccaatctacttatcttttctttatatgtttgtacgttatacaaaacatcttcttctatttcttcaatcgttactgcctttggtaagccatttaatatttttttagaagggccaaataagtttttgatgactgtaagatcgtacttcaccactgcacctccaatctacaatttctatccgtaataaccactctcatatactcatctccttatttttaaaataaataagaaaatccatccacttaccattctctaatgaaaacgcctttctcttgcattcaaatgaaaagcctgctctttccgcaagacgaaccgatggctcattatcaacacgtatatgtaattcgattctatgaaaatcaaggctactaaaaaataacggtaacgcagctttcacactttcaacaccatatccatttctccaatattgattatgtatggagtatcccatcatcgcccattgatagtccatacgtaaaatttttattagctctagctttccaatattagccccatcttctttacgaaaaatacctaatacatacatctcatctcgatgtgctgcttcatcaaatcctctaatccattccgtgaaccattcttttgttgatgatgccataacttgataaccatcgtcgtatttatactgagatggcagcctcttattaaatccatctaaccaactttcataatcatcattttggaacggacggatcatgagtctctctgtctctatctgtaatagcggcagcttcatttacatctcttcccttgattaatatttgaatattctttattatcttacacaaaatacaaaatctagtaaattattatgtttttgataaacatgcttctattaaaatacaaaaggaaaccctgttctaaaggatttccttttgtcatcacactaccaaacttatctgtaatttaaaacgttgtattctgtctttaatattccataaacatcaacatcttcatatgtatttaataaaagtctattttgtctcaatgtaccttctttacgtaaacccgacttctctaatactttaatcgacgatctatttctggaaatggcagatgcccaaattttgtttagacctaattcgataaagccaaattgaatcattctgtttacagcctcagttgcaaaaccctttccccaataattcttaccaatccaataaccaagttcacctctattgttacccttgtcaattcttagtgtaattgtacctacaatttctcttgattctttagagacaattcctaaaggatattcgattcctttcctaataagttctggttgcatatcaacccaatcttgcgcgaactccagtttatatggatgcggaagcccaagaatattagctaattccttgtcattagccaattctttaattctaaaaacatcatcattggtaaaaggttctatacataaatgctcagtttctaattttatagccatcttttctcccccttgtactgaaattagttagatccctttattttcaatattacaccaaaaacacaaaatttttaaaatctttatgatatctactaacagaaccataaacaaaaaatccagttatgctttgtacataactggattcctcattatctaatgttttttattttacaagtacattttctcttaattccctcttcaacacttttcctaaagcatttttcggtaactcttctaagaataccacttctggaattttgtaacttgctaacttctctttacaatactgaagaatactttcttctgttaatgttgtttcgccatccttcacaatgtaagctcttggaacctctccccaaaagtcatctggaactccaactactgcaacttctaaaacaccatgtatttcatgaataacatcttctacttgatctggatatacgttgtcaccaccgcgtataataacgtctttatatcttcccataatatgcaggaatccatcatcatctatcatgccagcatcgcccatgttaaaccagttatcttttactaccttctttgttgccttttcattattccaatatcctttaaacatgtatggacttttcacatgaatctctccaacttcatttgttgttagttcatgtcctgtttccgggtgaacaattttcacctctacatttttcaaggtctttcctacagaagacatcttttcttttcccatcattggatgccatgaggttacaacccaaccttctgtactaccatagccttgcaccatatatatgcctttttccatatatttttgaatgagtgtttctggcacttttgtaccaccgctttgtgctactttaaaggttgaaatgttacgttcttttttatttagttcatcaagcatgtaactataaacagctgggaaagcaagcatcgtagtaattttctcttcttcaatcttatcccaaataagagcaggattcgaatcagctaagaagatcatcgtaacgccatgataaatacaatttaaaatagaaagcacgccactcatatgaaacaatggatgcacagataaaaagcgttcacctgctgggatttctctttgtcccgcaatttcagcaaaataatgatgtaagtttttatgtccaattacacatgcttttgcctgtccagtcgttcctgatgtaaacaagtaaatggcatcgtcttcttcatgaacttctacgttcggttctgtcgttggctgtttttgcaactctaattcaaatgaaccaaagccttcttttgttgtttgaattacataaggaatttctttaacagcatcaacctttaataacacttcattaaattcttcatcaataactaacacttttaatttcgcttcttttacaatcgtttctaattcataaacagtcagctgatgatttagcggaataaataccgctccaatttttaaacttgccatcataacgcttggaaatgggtgattatttttgcatagtattcctatacgatctcctctttgcacaccattatataacaaataatgtgcaaactgatttactcgttcattatattgctgaaacgaatatcttttcttcccccctacaagcgcttccaaatttggtgattgcattgctctcttttgtaataattgtcgcatcgttctcaagtaaaactcccctttatatatgttaggttttttattttaccagattaactattaatttactaaagattacacttagtgaatataaaaagaatataaaatatccatttactttacaagtaaatggatatttcccattatatattagaatacttcttgttcatcacatattgcacatactcaggtgcacttttatcaatctcttcatcacttagtttatattctgcaccatataaataaaaggaaggtataaattccatacctgtgtataagcatgtagcttggaatggtttcgtcaactcatccattgtaattccactattttcatagtctttttctaatccacctatagaaatagccacaccaaattctttccccttcactttatctcctttagatccgtacgcaaatccatatgttaatacatcatcgaaccatttttttaataatggtggtgaactgtaccagtaaagcggaaattgaaatatatatctgtcatgttctactaataacttttgctcttcttcaatatcaaactcccaattcggtgccactttatacaattcatgcaccgtaatttcatccgaatatttctcaagttcttcaatccatcttttattaatttttgatttttcaatatcaggatgtgctacaattacaagtgttttcatcttttttcatcccctttataaattattcaaccctttacgtattagtatgaatgagtcacatataattgaaaagtacgtactttaaagtgctataggaaccttaaagtacctgtggaggtgttatatgaatcaaaatgataattgcccaattgcaacaacactcgatgtaatcggtggaaaatggaaagttcatattttatgtattttgtcggatggaaaaatgcgaacaaatgaaattaaacgagaaatcccaaacattacacaaaaggttcttacacaacaacttcggcaacttgaagctgatgggattatctatcgtaccgtatatcaagaagttccaccaaaggttgagtacacactaagtgaatatggaaaatctttaatgcaaataatggataatctgtttgaatggggaaaagatcatcagattaaaagattacatgactaaaaaagcactatatactttgtttaatcctctacgttcatattttttatttctataaagtttattttcatcattttttagctaacttgttttcttagattgatggacgtgaccccacatccatcaatctaaaaagatacaattagaaaaatgagatttctataaagtttcacatataaacactacttccgcctcattaaacgctcgctctactttttctaatctcaattgtacgtaagctataaagaagcacccctaaaccgagaattttttcattattagacgcattagaacctaaggtaatagtaggtacatttaaacccataaacctttcactccgttctataggcatataaaaagatactccttaaaaataaaaaacgctattctctctgtaaaatcatagaaaagaatagcgctttttattttgaaatagaaatcatcatttaaactaaacatgctaatattgattttgtgcgattgtcagttacctcataataaatttctaatcctttccgagtacctgtaaccattttagcagcttttagtttagataaatgttgactaattgtactttgaggcatttgtaaatctccatacattgttgttacattagtaggaccttttgcaagcattatttttactaaagatagacgaactggatgcgccaatacctttaacacctcagcgatttcttgaaacatttcttttttttctttcatcttatttctccccttttatatacatatttatgttatccatatatataattcggaggtatatgcgtttttgtgtccgtcattttaaaaaaatataaaaaaactttaatccgaaactaaaggattagcttaacataatgtctcaccattaatgatgaataggaatctcattatagaagcagcagtttttatactacaactctacattcaactaactaaaaccaatgaaaaaaagagcagatagtctgctcttttatgatgcctccttatgttccgtggaatgtttaacactccccagtctctttagtttattccaccctaccgctactcctcgaagcgatgagaatatagatttaatgacaacataagtcataaattggcgataaataaaacgttgtaaaattaaccatgccaatggttttgggttctcttcctctaatttaaatgcgaacagagaagcgagaagatccattaaaaagaaaacaagataaaatcctaaaacttttagcggattactactaaatagtcctataatcattaatatatctgcaaaaggagcaatgaattgcagcacatattggaataaccacatattaggcagtgcaataaatcctaatgttttatgctttggattacataacgcttttcgatgtttccaaagacattgaagtgtaccatatgaccaacgataccgctgtttaatgagacttttcacatcttcaggtgattccgtaaaagcatgcgctttttcttcatatacaattctatgcccttgacgtaaaaatgtaatagtaagatccgtatcttctgctaacgtatcttcgcttaaatatccagattcaactacattctttttgcgccacgccccaatagctcctggaactactgtaatacaatttaactcatcaaaagctctacgttctaaattaaaccctgtaatgtactcaacatgttgccaagtagttaacaaattccgtctattccccactttgacattacctgaaactgcagctacattctgatcttcaaagtgtctaaccattagagaaatggcgtcttgcgcaataatagtatccgcatctaaagtgacaatgatttctcctcgcgattgttgaaaccctaggttcattgccgatgatttcccgccgttttctttctgaatgaaacgaactttagggtgtttataaaatgtttctttcattacttttgacgtaccatctgtcgatccgtcatccacaacaataacttcaaattctctataattactatccaaaattgagtgaattgtcttggctatcaccttttcttcattatatgctgccatgacaacactaacaaaaggttgataggacgaattaatatagcgagataacgtttttcttttctgcttccatgcaaaataaattaagaataaaaatcgaaaaatccctaatccaatagcaatataaaaaatagttgttaatatatgcttaaagtatcctgcccctgaaaagacagctttattgtaaagtaaatattgcttcccctcagaagaaacaggaggcatgatttcatctcgttctttattcattaaatctgaaattgttacaaaactatatccatgcttttttaggtctttaataatgattgggagcgcctctactgtatgtgtacggttccctcccgcatcatggagaagaataatatttccctctcccttataaatgggattaagagcacgctttactaattcatttgttgatggtattgcccagtcttcgggatcaactttttccgctaccattgtatagttcatattttgcgcacgtaaaataggcaatatttcatttgatgaatccgggttagcatccgcttcatatggcggtctaaataaaaccgtagaatgtccagttacttcctgaattaaacgttgcgtcgtattaagttctactttcgttcgtagtaaagacgtatctgctatgttaggatgcttgaaagtatgattgccaatttcatgcccttcatcgtatattctttttacaatactagtatttagttgcgcgttttcaccaagtacaaaaaaagcagcttttatttgattctcttttaatatatctaatatttctggcgtatatttcgggtctggtccatcatcaaatgttaatactacttgtttcccatttggttttccatatcgttgcacttcatatgcagatggtaaggattgatatacttcatctgtaatataatcatctttgcctactttaaaatctctcaatccattttttctttcattctcaatctgtaaaatttcaccttgtccagaataattcacttcatctaaactacggattttatgtaatacattaggatttttttgtacctcaataggattttttaaaactttccatattgtaggatcttctgctcctaatctccatagcgcaaacccctttgcatgattgtccattgcgattttcacttgattataaagagtaacaccgtctaagaaccaagcagtatgttctttctctcctgttttatatctaaaatacggatttccactcaccttatcccattgaatttttatatttgaatcatgagccattgccataacttctgagaaagtcatagactttgcagcttctttactatttacttcccaatcatatccatagttaccgaaagcaactacaagtttatcagacggaatattcagttctttcaatgtatgttggaaccatttatttgaagcaattggtcctggttccccggctccatagtgctcatcgtacatcattacaatcattcgatctattatttttgctaacgcactataatcaaaagccttatcattagctggaacatcttgtgtaacgagcaaatcatgttcatgaaattccgtagtaagttctttcataaaatttgttaagttttctctatcactttcaggtacggcctcaaagtcaatattaatacctgaaaactgattttttttaacttggattactaaatcattaataaactttgtctttacatcgtttgaggaactcagtaacttatgaattagcccactatcaggaccagaagcttcctcagtatagttagtaagcaaaggcataatcttcacttgatttttttctgccaactttactatctcaggttttatctcacttctaatcgttaaatctgcttttaaatgataccactctggtactaacgtagttaatgaatcgatattttcttttaaagaagcggtactattttcatcccagtttacataaaaaccatacacttctttaggatgtttactatccttcggcggattcaccaaatttttattatccttcgtttcggtatttgggttaaatgcttcctcctttaactgctgatcactaagtttttgattaattggtacaagtttagtatcttgttgtacagcggtattcatatttggaatttctggtgttgaaaaaatactttgaaagaaaaaataaaatacaacacttacactaactattgagatacatagaaaccaaataaaggctatgtttctccttcctttcggatcataaaaaacaggtttttctttatctttctcttgttgaatgtttttctccattatatttttcacatactccttcttaatagaactatagaatattaaagtgcaactttaatcagtgggggttttgttcacccccccactaatcatcagccctcaccaatcgggctgcccagcaaatagcggaataaatccttttagctttgaagtgaatctctcacttccatattctattgattcttcttttcattcccttgctggtggcccctattttcttgttgagaccccctaccattgttcccttgctcgtttccgtcattttctttctgggatcctcttccattgttcccttgcccatttccattattcccttgttgagatcctcttccattgttcccttgctgattcccattatttccttgttgaggatttcttccattgttcccttgcccatttccattattcccttgttgagaccctcttccattgttctcttgctcatttccattatttccttgttgagatcctcttccattgttcccttgctcgtttccattatttccttgttgagatcctcttccattgttcccttgctcgtttccgttatttccctgttgagatcctcttccgttgttctctttcctatttccattatttccctgttgagatcctcttccgttgttccctttcccatttccattattcccttgttgagatcctcttccgttgttcccttgctgattcccattatttccttgttgagcttctctactgttattctcctgttgattccctctattttcttgctgagatcctcttccattgttttcttttatttgcttcgatggctgttcctctgttttcttttgttctttctgctcttgcttttcatattttttttcttttacaggagacaaatcgagtgttgcatcaggagatgactccgggtgtgattgcacctcttcttcgttttccaccggattagacggggtgacaggaggcgtaagtgatttgttcttctcattctcttgctttatataaacacctgtgccaattccagcttttctagcattctctcgtatttgcattgtgctactttgatattcaactgtaatatgttttagctcatattctttctttaattctttcattgccttttccaaaagtggttctagtgccttgtcctttgcaacagctgttagcataacttgcttatcattcgttaaatacttatcctcttgactttgctttataatagtacgtattacttcttgtaattgtttatttttccattgcttcaattcttttaaaatacgccttccatcatcattacaagcctgcaaatctataacacgaaaatcctttgttacgctcacctctaaacttggatttatatcaactgagacgtaagcaaatactttttcttctggttggttgtagaaaaacagcactgcaaatagaaaacaagcaacaagtattgatgcaggctttaaaaaggaaggaatcgaaaaatgcgatgctttttgttcttgctcatcaaacgagatttcctccccgattatgcaagaatcccctcttcttttacacgtaataaactctccatttggtgttaaaacaactacgctatgcttttttatatccatcacaattcctttattcatcatgcttttcccctcttatgtaatccagaatatatgtatagttgtttgcaaaaataatacacattgcaataatgtattttctatgtcgttccaacgttttacgacttaccctaacacgcggttcaatctgtttaagcggtaactttttctttcggaacagctcttccatcatttcctcttcttttataattattttcacaatttctattaagtgctcacgtgtatcacgatgcttaggagattctttagcaagctctgagaatgtgattttaaactcagctagcacactttgaaaatgaagaatttcctccttacggttactattttccatctctttcatatactccgtaagcgacacttgcatttctaacatttcctcttgctcatcttcttttaaaaagacaaagttatgtttagactccttacgtatatagtcaattacatctctttttataagaagatcagcaaacgctaaaaaggattttccttttgtataggaatactgttcaattgcttcgttaaaagcaaacaatccaatgctatattcatcatcctgttctgtaatatatcgacggcagacagatgagattgattttctaataaaaggctgatactgtacgataaacgcttctttgtcttcttcgttgttttgtatgttatatacgatatcttctattttcggttttcttaagatcttcattactaaactcaacacttgtaatctcccagcctccttcaaatagcaaaatggccactacacaagtgaccatttaaccagattttcttggtacttttcttcggtcttgttttcttgctgttagttatatttttcgagtctaacttttcccaacgttttcttaataattttccttttctctcggcactaaagttaagtttgtatttttatctactttcttattttctaccgttcgttttgcttattctctttctattttatctgcaatccttgaataactcttctctatataattggtaatttcatccttccattttggatgccacttaatctagtaattttattaatacttctatattctttcatagtcatttttcttctatttatttttttcactatacatattcggaggagtacaaagttttatgggggtcaaaaaatattttcataaaaaaatacatatttatttcaaaaataaaaaccatcaatttgaaaaagggtaatcaaattgatggttttcttataatatctattaaattaagttggattctcattatatctaaaaaagcactaactattttctaccggttttctccatttttatctttcttggttatcataatatgtcttatctgcgtattttctatcatttccttttagataagctaaaattacttttggatttttaagtaaagtccagtctccatatgtatcaaatcttctgcatgaagtcatcattccatttttaattgtaccgaatttcttattatttcgctttccccatttttttaaccgtttggcaaaatcagcatcttctgccataagcatgttttcattaaatccgttgattgccataaagtcttttctatagcaccaaaaaatccctacagatatagctccatacttaaaaagtaagggaattattattaacattgcggaaacgaatattcctaaggacattctttcaaactttccagttaccccaccaccaatgtatttgcctgaagctagatgtttatctacattagacaacatagactctgtcatttgggtatcagcgtctatagtaatgattatttctccactagctatttgggctcctgcatttcggattttggataagtttttatcgttattttttaatgtaatacagttataagactttgctatttcctctgttttatctgtgcaacgatttaaaacaactataacttccgtttgctctttatatgcctctgatgcctttgcaattgaatctaaacattttctaatgtacttttcttcattgtgtgcaggaattataatagaaaacttcacatcttttttcaaattgactcctgaagattcgtttgtctcagtcataatatgccccccttattttataaggtaaatatctgttatacataacgtatattaaaattcaataaattatatgataggaactgcaggtaaactattacttgagtattaaaaaataaaaacgttattctttctaaataagcaaaattactagaaagaataacgttttttattagttacattaatattttattcgttgctttatttcttcaaaacgagcatgtataatttttctgatatctggatgattcttatataaagtaacagtatacatgatggaagatgcaagaatagtagaccatattaaccaatctccagcatgagaaagaactttaattatttcactcgtaaattcttcctgtccgtcatgaaatgtatagctgagtagttaccttatttttaaaaaaacattctgattatttctttttcacttcttctacaaattcccatgtctctccgttatcttttgattgataaagtgcactactatcgccattgtagtctccatctgccccttgtccaactaacatattaaaaaccccatctttctcatatggcatactaggagaatcaaaaggacttattgtggactgtgtatgatctaatttcacttcatgcggcggatattctacctttttgaaagatactcccccatcatctgtgcgatataactctccttcattaccagaaggcctaattgctcctaaaaacccaagtttatcatttataaaaatgattcctgatacactaccaatccccccattaaatgggtctggattgataacctcccatgttttcccttcatcactagtcttgcttaatgaataaaaagcgctccctaatgctttatctgtcatatttagtttataaccaacttctttcgataggaaaaactgttctttttcattctttaaatcttgttgttccttctctttaagcatatcttcttttggaggcgtctttgatttactccaacttgcgtcacttattaaattatatctagcagggactagctctttctcttttccagggacaaatatagatacagtatatccaatgatatcagaagctgcttctttaacactctgcctcttaccatcctcagtaatattaataattccctctgtattggatccccaatttctttttccataataaatcaacccatacttactttcattccattttttgaccgtttgcttaactgggatcgccttaaccgttttaattaaaggttctactaatttatcatcattataatcaggctttgcatatccatctcgtattatagtaatatcttctgatttcttcttattataagagattaaataagtttcttctttcccatcaacatttttcccataaacaaatgtatcaaacgctgtgattgttccatctgaatgaaatgtaagatcaaaatcagttgccatatacaatttctttggcaaaggatattttttatttatatcttcaaaaataccttctactccagatttatatatattattatgtttaagtttaactgacctttcatgttttaacttttctataaaccatgccaatttgccattgtaatttattgcacttttataaatctgcatcccataaaatgatgtaattgcaacaataatgataatagaaatggatctccatgctattgaatttgttaattttttagattcatattctctattttttatcacccgcattgtagtaaatgtagttatggatataaaaagtactatacacaataacaaaatgtaaatattataattcattcttccgtacttacagtataaggccaactcatagcaaaagatcccgtatacaattattagtattggatttgttactaatgacagaagtatcctttttgtattttctctaaatatagaaaccactcctaattatatgaattactgatattaagtatactttattgtaaagtaacaaaaaagctatttaatcttgccgcaaaaaatacaatagacatatgaatattatattcatgttaaaaaggccaacaatccaagattgttagcctctacttcccctattcgtaccttttatcactttacttcctaacaactggaatccacatttcaccaaacactaagccgtttcttttccccatctcaaccgtcgtatttggtccaccaacataagcaaactcatttgcatctggtaaagcttgaccgaaggcgatgccagtcaacttattacttaactcttcagctgttttgtcttccccttttactactaagtattctcccctcggaaactgaattactctagattcttcttctatttgtgcttctgtcatgacacccgcataatacatcattttgttattcaccgcttcgctcacagaaaaaatgtattcatttgtcgctaaagcttttaaagtgtccagccttccatcttctttaacagccgaccaaaaggcttccttttctttatttattccagcaaagtctgtatattcactcttaatttcagttccaatacctaacacaataaagctatctttttcttctatagtataatttttcatatgcaaaacctgcctctttttttattaatcaaacgatttatcttttcatctgatacgtttataatatctttaaaccatgtcaaaaaatgatactgtttaggagaccaacatgaaaaaagttgaacggatcaatacaattatgcgatatatcaacaaccgctcccactttacaatttctgaaatcatacgagaatttaacatatcaagatcgacagctattagagacattagagaaattgaagctatgggaatgccacttgtcgctgaagttgggagaacgggtggatattttgttatgcataattctatcctgcccgttgttcgctttactgataatgaagtgaaagctctttttattgcctttatggctacgaggaatcaacaacttccctacctaaagagtcgtcaatctttagccgaaaaactactaggactcatctcagaaacccagcaggatgaccttgttcttttaaatcaactcttgctgttccaaggaactaatcctcataatcccgatctacttgagctttctgatctcccccatcctatgttagaaaaactcattcaaatccttcttttggataaccatttattgattaccattaaaaaagatgaagaaattaagtcttatccaatttatctattacacctttatcaagaaaaaagccattggattattgaaggatttgacttaaaagaagaaaagaagttaatgtttcctgtcgatgatctcatcaatatcgaaccatacacgacgaataaaaggctcaataagaaaaagattttagaaaaactaagtaagaaggctgaagcaattaaccttgtacttgaacttggtccgacagcaattgcccagttcaaaaaataccatcctttaaaaatttcaatatcttatactaatccttaccaatccacagccattttaaaaacttttatcaatgttaacaatcccgatgaagtgacggaaataataaattggctgctttttctagggaaggatattaaaatcaaagaaatacccgatgaagtattagcagatttacaaaaacgagtgtgcttatacattccataagcagtgagcctcaaatattaagctttatcactggacaattattctatttttaaataccatttcatttactacaatgagagcatgataaataataaaagcacggaaaatctcccgtgcttttctaaatatatattattcctgaaggtttcgtttatctcgtttcttaccctagctgacgtttaaatgctttactagcaaagaagtaagcaataaccataattccgacgcaccaagcgagcgcaatccaaatatcgtttccaacagttccttcatataaaagagcacgaatcgcattcacgattgaagttacaggctgattctctgcaaacacacgaacaatttttggcatcgtttcggtaggtacgaaggctgaactaataaatggaagaaaaactagtgggtacgagtaggctgtcgccccttccatagactttgccgtcagccctggaatgatagccaaccatgttagcgctaacgtaaacattcctagtatcccagctactgcaagccaatctagaatattcgcactggaacggaaacccattaagagcgcaacaagaataactacaacgatagtaagtacattagcaacaagagaggttaaaacatgagcccacaatatcgatgaacgcttaataggcatcgtaatgaaacgtgccatcagcccactctttacatccgtaaagagtcgcacggaagtgtaagctacaccggatgcgatagccattagcaaaattcccggcaataaataattgacgtagttatctgttcctgtctgtatagccccaccaaatacgtatacaaacaatagcatcatcataatcggtgtaatcgctaccgtaataattgtatctggactacgcataatattgcgcattaagcgcccaagtaatacccctgttttgcttttcatttacatctcctcctttttgccaatgatcgcaaggaatatttcttccaatgtaggctgcttctcgatatactccacttttgccggtgggaacatctctttcagttcagtaagagtacctgtcgtaataatttttccaccatgcaaaattgcgatacgatcagccagttgttctgcttcctccaagtactgagtcgtaagcaaaatagttgtaccactatcagcaagttccttgactgtatcccacacttcaatccgcgcttcaggatcgagtccagtcgttggttcgtcaagaaaaataactgctggcgccccaatcaaactcatcgcgatatcaagccggcgcttcatcccgcctgaatactgatctgccctttggtttgccgcatcagtcaggctaaatcttgcaagtagattgtcagcaacttgagcgggactggaaacaccacgtagcctagcaatcattatcaagttttccctcccagtcagcataccgtctaaagctgcgaactgccctgtcaaactgatactttgacgaacatgatttggttgacgctgtacatcaaatccgcaaatacttacttcaccactatcttgcttcatgagtgtcgaaaggatgttgaccgttgtcgtctttcccgctccatttgagcctagcagcgcgaaaatttctccacgctgcacctcaaaatctactccttttaaaacttccttgtctttaaaggattttttcaagccttttatagaaatcgctgcatgactcatacttttttcctccctataaaaatgttttgcggagataatttatttacctctatctatttagtaccactgatattctgtatcacttagtaccgagctaaaaatataactgaatagctatggtggcaattcatatgtgtaaccagctaatcagtcggtattacttattccatttatttttttctcaatttcttcataatactttcattcaaatcttcacgatacttggagacgtaagttttagcatttgccactagttcgtcagcaaaggaagccacgtcatccccagtaatgtcaagcacttgtcttccttctgctgcaccagcttcaaacaaatcgattaattcatactgtatgtgtaacatatccatcccgttacccgctgagaaattccacatgtagttttgaattttcttaaatacaaattggtagtcctctggcagagcctcaactcgtgccatcatcattttgtactcttttttatcaccaattaactttttaaacatttctaacatcttattttcctccttttttataaaaccgaacaagaaattcccaaagtatcggccggaacattttatcttatgaacctattttgacttcaagacgttaatttttgacgatacaaaatcccattttttccaaaacaattcaagctcttggcggccctcttcatttaatgaataaaacttacgaggcggtcccatatctgatggtttcttttcaatattcacaagctttttcttctctaatcgtacaaggatggtatacaccgtaccttccacaacttcggtaaacccaagatcattcagatggcgggtaatctcatagccatacgtttcacggcgactgatgatttccagtacacacccttccagtgaaccttttagcatttcagttaaattttccatgtcctgatcctcctttaccccctattctgtctgacttatattcagtatcacagagtactaaggcgaattttttactgaatagcttttgagtaaaaccacactattcagtattacttattacaactacattgtatgactaagtagttgtggatgtcaactttattttcaaaaaaattaaaaatccgctttaccctaaccggatacagcctccttttttgttgtaagggccatcaaactagtaaaacagagctgattcaaagtgtaatttaaatcagctctgttttattgtttttataccgatatatcttgttttttcacgatacaaattgtttctcactaccattcccattgcatataaagcataaaggcaagtgcgatcagagaaaatttccagagattatccgtacatgatacgagcccctaaaatacaattctgttagaaatctgttctctatattctcttttattttatttctgatagttgattagcaacactatctaaaaatttttctaccttttcttttgatatatccggcgcatgataaccgatcgtaaatgtaagccttccattataagagcttgctcccattgaaaagaatggtgcatacataataggtgatgtcatatacccgtcctcagcttgaatttcaccaaactgaatagattcatcagcgattactcccaaatttgtcagtaacggcaatgccattcccatctgtacagcctgttcatattgctgattaaacatttccttcactgtagatagcttcatttctgccagtaactccattcctgctgctgaagaaagacctggattttgagactttattttatccattgattgtttaactcgaacaagagtctgcttaaatgtttcatcgtcttccattttaatcactggcatttccataccggataaattgcaaatagcaccagttgtattattaggcagatatcgacgtaaatcaattgtcaagccaatcattttttctgcagtgcgcggttctgcatacacagtgaaatgtgataaagctcggaagtatgcagtcatgattacatcattcaaggtagcctgttgagcttttgtccattgggttaaacgtagagtttgctcatggctcaatcgccgtacggacatttggggaaatttatttttgttaggttgagatggaaaagaccataacgatgcctgttgttcttggttaggacgatacgcactttttatgtccgatattccagcgtatttgaatacatgtaattgatctcgacaactctcatttccctcatcaaattcctttataatttgcttcttagaccgtcccaatgaaaggtgagtatatatcgttccaagcaatttaatatattccttgactcctgcaccatctgaacatagatgagacaatttcacaactaacatatctgttgtagtgccccgtaataatttcgtttgaaccataggcccctgaatacgatcaccaggttccttaataaaatctattgccattatttcaagttcttgattatttccttctgcaaaaaagcaaatagatgaattagtgtcagatgaatgttcctcccagtaaggaatatcattttctacaaaccggctgttcaaaactggttgcaattgcaacgttatccttactgattcttcaagtatttccttggatatacctacaggaaaataaagaactgcattaatttgttgatctgcagaataaagacctaatacataattcattcgatcttgtggtgttactgaatactttcttttctccataattccgtccccctttaggactttttgtataaccctattttccatatgcttataatttttctagtcatttttcttcaagagctaataacgcttatttttcgaatttttaacgaaatcatcttctccgtattggttgcattctttttgcaggtgatatattcattattttattgttattaacactgcctaacctcacaataaaaccaaacaataataaattaagtttacatatacgtaaacattttattataacgtctataaattatcaatatagcaaataaatcatttttatgtctgtcaataaaaaataatatattcaagggccacttcatcataaaagattgatgtgcatgtaaatgtacccatatcactttcaaaataagaatgagaattttttcaacaaaataagctgcagttattgattttacagtaagaaaagcccctccattttgaaaatgcgcaatcaaaatgagtagggctatttccaatttaaattttataaaaaaatgattatcataaataatattttactttttagtctaccttattattttcaatccattttcctaataaatgaatggattttattcatataatttgaggtggtatcgttggtttttaaaaatagaaagcttattttcaaatcaaatgaaaaagaggtaaaattatagatattcatgtagaaatttcgttttggggatacttaaaatcttaaggtgatgggcatgtggtgttacactttaaaagctttataaaattataaaatttatagatatagcagattttctttattaataatcatttgtatgtacgtttactcacatacatacaaatgatttataaagctacaattaagtgaaaacatcttttccgttacgataacatcatagccatgtcttctgctacatttgtaattagttttaaaccaaatgtttcttgtaatacatcaagcacgccaggtgaaataaattcaggagcctttggaccgatgcgaatatcttgaatcccaagactaaatagcccgagtaaaatggcaaccgctttttgttcaaaccatgatagcacaatacttactggcaattcattcacttcacattggaaagcatcagctaaagcagccgctattttcactgtagaaattgaattattgcactgtcctaaatcaatgtaacgcggaatttccgtaccaggtacaacaccgtaatccacatcattaaagcggaatttcccgcaagaagttgttaaaataaccgtttctggcggaagtgacgttgctaattcacgataatattctccgccttttcccggtgcatcacaaccggcgataacaaagaaacgctttattttcccctcttttactgcatcaataatttctggagctaatgataatactgtattatgatgaaaccctgtcactaactgttcatccgactccatatgtacttctggaagttctagtgctttttgaattaatggtgtaaaatcatcattttcaattttttgtacaccttctaaacctgcaatgtcatatgaaaagaatcgatcagagtacgatcctttaattggcataacacagttcgttgtagctaatatggcaccagtaaatttttcaaaaaggcgtctttgatcataccatgccttaccgatgtttccttttaaatgtttatattttttcagctgcgggtatccgtgtgctggtagcatttcagaatgtgtataaatattaatgtcttttccttctgtttgctttaatagttcttctagtgcaaataaattatgacctgtaactacaattgctttaccttctacacgattttgtgtaatttgtacaggctctggcacaccaaaatgattcgtatgtgcctcatctaataattccatcacccgtaaagctgatttccccactttcatagccatatcaatatgctcttgttcgttaaagttagaatttgttaatgtcatatataaagcttcttgtgttgtagcatctacaaatgcatccgtatatcctagctgagcagcatgtgtgcgataagctgcaattccttttagcccaaacacaatcgtatcttgtaaactcgcaatcgtttcattcttgccgcacacacccattactttacatccgcctgctggcgtttgttcacattgataacaaaacatatcatcccaccctctctcaatcattcattacaccttaagcataatacccattgaaaaaaagtgatgtgatatcaatcacaataatatataaagatttgtgacagttcatattgttgacataatatttttattgacactaaaaaatatgcattagtgtacacacatctttcgatacttttaaatagctaattaatttggagaaatatatacaacgaaaaaaatttttgaatcccatgtacaaatagttgcaattcatcacatatgaaatagatataaaaatacgctcttctttctatcattcaatagaaagaagagcgcatttgtcattttaaggaactatcattttttattaaagtctttattgtaaacctttttatttacaatacatttacattatcttaacattacttacattatttatatgatatatttatatagaagctacttaagaaatttcatatacattttatctttatgatctcttatctaatcaataaaaagatcatgttatatttttataacaggggtgaattacgatgactgaaactttaaaaacacttataatgcttgatgctacttatgttgttatagcaattatgacagtactagtatttgtatacttggaattaaaatctcagtaatatatgctgacgtaatcaacagattcagcatttaaatatagttagaagaaagagaggagaaaattatttctcctctcttttgtatttctacaatttcttattttaataaatccaatgtatataaaagtaatcctttgttccctacttctccatgaccaggcactactacatttatatttctatatcgcttcagcacattctcaatcgatgtagaccattcatttacataagcatccgcaacgtttcctaaatctttcgcggacgtagatttcactaaacagcctccaactaaaatattgtattgcggtaaccatacgacaatattatcttctgtatgccctttccctggataaaatgtttctactttcatatttccaaacttcaaatttgtaacggtttgtaaatctccaagtggctcttcatatccacttttctttgctagttctgcggttaatgctgtactatgcgctttaattcctctttctttcaacgtttttattccgccaattcgatcagcgtgcgcatgtgtaataatgacatccgttacacgcttctgaaacttcttttctaccatttctattagttccttcgttaatttgtcatcccaagaagaatcaacaagtactaaccctttagaagtattaagaactagaccgttcgaaggaactgcttctccattaaaagaacctaactccgtatgaacccatacattcttgtttaactgagatattgaaatggttcccgtctcattttttattactgttttctctaccttttgtgatgcttgtacagaagaaattgtgctaacaaattgaattgttcctagtaaacctacacataatcctacttttaacaacgtattctttttcatgtcatcaaccctttccttcaagccaaatagttattacctatattagacaatttatcttcagtgtttgttccatataattgaacactttataatcgcggcttatgtaaatacacgcatggtgcagtaaaaaagatcacccaaatggatgatcttttttataatttatcaacatattgcttcgcttctagtaaggaaaaaacaaaaacttctcttactctcttaactgctgtaacttttttgccttcttctacaagctggcgtagttctttattaatttcaggttctctttctacaattcccatttctttcgtaattaattgtaatctatcttcaattctctttaaacgcgcatcatttttcttttcaattgtagctaatttttcagcgatataaatgaaaccaaaggctaatattagtataaccatccagaattccatgaatgttcccccttactaactttcatttgttttatttcactaacttatcagctttagttattgaaatcattcattccttacaaggaaagggcaaactaaaactttctcaaaaatttgtactagacatgatttctcctcaaggttgctcaaaatggactggattaggtgtttttctagatgattctaatgaagaattacagatttattcactcggatggggcgtcggatttcaatgtatgatggtttgttatccatactgcgggaatggtgctgttattatgaccaattccgatttaggtgttcatcaaatggaagggatcattggtgaggttgtaaaaacgttatccttatatagataaagaagctgttccttccagcttctttatctatataacatttttcgcaacaatttttatatgttctggtgcgataatttccgttatactttcttggaaatcttcccgcaacatttcttccaaatgttctaactgcacttcaacatgtgtgcattctaaattatgtatatttaacagtgcataatgatcttttttcttaattactaaatattgattttcctctgtcacaagtacagaacctaatcggactcctaataagcgttgatcatcaaacttcataattacttctccttccctcatataaacaaaactacaatgaaaataattacatttatggaaaaacacgcttatttagactatatcataatttactaaaatagaaatatctttttctgtttcaataaaaatccctattctttcatatatttcgatacaaaaaactttctcaacattaaatttgaattttcagtttttaattccgtaaaaatctattataataaagttaataaatgtttgacctctcctaattcatgtacatatggatgatcagtagttatcgctactgatctatttttttgatttcagaaagtacatacgctgcatcctttcctacaccacaaataagtgcggaacccctttgagattgccatggtaaaccgatataatacaatccttttactggactgattccctttatatgattaggaaatcctttctcattcactgcctgttcaatttcaatccaattataattttgtacaaaaccagtttaccataaagtaaacgctccttcattctatcttcccagtctttagcgcctgtgcccagtcatatctttcttgttgaacagccaatccagcagcttcttcccaattataaggaactgaaatttgttcaattgtccattctcccaaaaccttttctatcactacatattttgcatgcggagttcctgattccattttatgcataacaggtaactcatctttgtatgctggaagtcctacacttcctggatttataatgatctttccgttcgctaaataaacaactctaggaatatgtgtatgaccacatactattattttttgttctatattttggagttgatccattatatttttttcattctttaatattgcaccattctcatttatctcttctaacaaatacacttcatctgaagttggcgtaccgtgacaacataacatatcgtctacaataaattgtgaaggatgttgttttaaccaatctatatgatcttttgttaattgattttggacaaaagttagtgtagcagactgctcttgtattgtctcccaaagcatgcgatcacaattacctttaatatgtatcatctcgctactcattaatatatcgattgtctctaaaggatctaacggcccatacacactatctcctaaatttattatcatttcgaccttgcgacgtgtaatatcttttaataccgattttaaagcgtgactatttccgtggatatctgaaattatagctattttcatcttaatccctactttaatatattatttataaacatccgcagccaattcccgcaaaacttctacattcactacttcaaaacaaccattgtttttgttaattatatttttatcacaaaagagattcaaagtacgtaataaatgccgataactcgttcctaacaactccgctatttccgttaaattcccactaaacacaattctattttcatgctgaactgctcgttctcctgctgctaacatgtaactcgcaagtctattttcaagcggatacaataaattaattgtactgtttttggaaagtcggtttaatttatgtgccaatgatccgcaaatacatcttaaaaatttcgcatcatgaaatagcttatttctcacctttcctaaaggtaaacccacacaatacgaatctgccatcacttgtacgtttgaagtgattctttgagaatgaattaactccacatctccaagtaactgcaaactatcataaaaacacagtaatacggatttcccattacttaatgtgttaaacgctttcgcttttccttcaacaaagaaatataaataatctatctcttcattttctctacaaataaactcattctttttaaaaaatataagttccatatatggcttcatatcatgactaaaaaatgaatcaatattattttgctttatatactccgctaatttaatagaattacatactttcttcatagttccccacctttacaactcatccccattgtaatcaaaattttcttcttccactatgacatatgtcataacaatacacaatttcagcatgatacagtcattacaaatatgaaatataaaggggatattacattgtataactttctttctgtctttattggtgtgctcatcgccgttatgcttccattgaatggaattttatccgagttaattgggaagtatacagcaagcgttgtcattcaccttgtcggtttaattgcagttatcttcattttaatcataaacaaaaataaaattcgtttcgataaaagtattccactttttttatatagcgctggagcgattggagtattcactgttctttttaacaatataagtttctccgtccttggtgcttctattacgatcgcattaagtttactcggtcaatctattgcttccatcattatcgatcatttcggcttattaggaatgaaagttgcaaagtttgaaaagaaaaaactaattggattatgtttcatctcttctggaattataatcatgacaatttattaatgggggcaagaaaatgttatatattacgatcgctattttagctggtgtttctatcgttgttgctagaattattaacgcgaatttagcagcaaaaatcggaaattgggaaggcacgttttttaattatattactggattatttttctctatgttatttttaattttcagttcagattcattgtatattccaatgcagacgttacaatctattcctattgctgtgtacttaggcggattagtaggcgttatcgttatttcattatccaactatattactcctaaaatatcagccttttatttaacattactcatctttatcggacaattatttgcggggactattattgatttcttcctgacaaatgaactctcaatcggtaaagttatcggtggcattttcgtattaattgggctcacttacaatttactcatagatcgcccgataaaaactgtgaagcataaccaagttcaactataatactttacgcttacctatcatatattaatagaaaagctcttcacacgaaataatagagaggagaaaaccctattaaaaaaattattttattgctaggtagcgtattaattatttgtggaattgtatggtttgtaaactcgggaaaatctattcaagatctctatactgcaaacaaaccgaaaaagaaagctactattatttcaagctcgcgagatccaaatgagccccctgcttttttaggaaagcaggaaataaaagatatacatgtagaatcaattaaaacaaaaaaggatatctttctcacaaaaacagatgaattaaaaacatttattaacagtatgaataccgcaaaaaaaggcaaattaacattggatgaagaaggatcagatttaatagattgtgatatgtggattactttcgaggatggaacttataaaaaatatttcatatgggtagttgatcatcacagcagcgaagtgatgattgctcagcaagatactcctgatgatgtaaaccttacgtactatcagttaaacgaagatagttcaaaaaaagtttataatttatttaaaaaaattatttaaacgaaaaagtcatgagcacgcgaactcatgactttttgcactatatatattccgggaacactctacaactcttttcctgctctatatcatgaccaaagaaaataattggtttctcttttttcacaacttcttttaaacgtttaattgaagataaagctaattctggatcaaatcctgcgaacggcacttcatcttcaaaattctctttcgtgtacgatgcatcaatcgttaataaaactgaaccggattgctccgtctcaatgaatagcgactgatggcctggagaatgacctggcgtatacaataattgaacacctggtaccacttcataatccccttcaataattttgtagttcaaatgcggtaatatacattctttcatatattcttctctatgaagtgctgcctcatattccgttcgctgcacaataattggtgtatttgtaaaagcaccgtttcctcctgcatgatcaaaatgtaagtgagaactaataatatataaaaggtcgtccggctcataccctacacgctttaatatattcacgattctatcttcttcagtcattttcggtaagatctgtccttcaacaaatgtaccgttaaaaagcccttcattattaactgcactttctggcatacctgtgtctactaaaataggaccttcttccgtctccaaaagataacaccacaccggcaagtttaatagtttccccggtgttaacgcactgttaacagacgaatgatccaacatgcaacgacctgctgggatgaaataaagtttctttactgtcattatgtatccacctttacatttagttttggataaagtaatacagtaaaaaattcttctttttagaaataaactccttctagactatcagtacagcttgcataaaaaaaagggtatttttttacatagcagtatttcaccatctataatatagaagtaaagaattcttactttaaatgaaacattaacaccgattaacgctgaaaacttaaaaaaagcacatgcactacttgaaagcgggcacaccattgggaaaatcgtattagagaaattttaatcatgatagtgataggtagtatgtgaaattatattaacgatttttcgaatatatctatcacaaatcaaattatatcaacgattcgacaagttatatcgatttatcgacaaataacaacaataagaaaaggctgttccagatgaacagcctcttctttatttacttgaaatctctttattattttgaacgtctaacggagctcgctttcctattccgaaagcatagaaactaattgtaacgatagctaagaaaataatacctacaactaatgaaatgcgtgtatcatcgttaaaccacattccgattaataccataattaaaaaggcaattgttaaatagtttgttacaggagcaaatggcattttgaacggatgatctttcatctctgctcccttttctttcctaaaacgaatttgactaattaaaatgacgaaccatggtaccataccaggaagtacactcgcactatatacatatacgaataagtttttcggtgcgatgtaacttaaaacaacaccaaccgccagaccgataattacgccaactgtaccaaataaaggcacaccatttccagaaagtttcgtgaaatatttcggtgcttgtccatttacacctaacgtatacagcatacgtccagcactataaataccactattacaaccagacattgctgctgtaataacaacgaagttaataaggccagctgctgccgtaataccaaccttcgcaaaagttgctacgaacgggctaccaattgtacttaattgatcccacggatacacagttacaataacgaaaatagcaccgatgtagaaaattaaaatacgccaaattgtactttgaatcgctcttgtaagtgtcttctttggatccttcgcttcaccagcagtaataccgattaattccacaccttgatacgctccaactacaagtgataatgcaaagaagaatcctgaaaaaccacctgtaaagaaaccgccatttgaccaaagattagatatgccaatcgcttctccgccgttaccaattccgaagaaaataaggccaaatcctgcaataatcattaatagaatcgtaacgattttaatcatcgcaaaccaaaattcaaattcaccaaatgacttaacagaaattaagttagctgcaccaagaataaccattgcaattatacctggtatccaagctggtaaatccgggaaccaatattgcatatacgctccaaccgcgataatttctgacatcccaacgataacccactggaaccagttactccacgctgtcatataaccagctagtggatgaatatacttatgaccgaatgtcgcaaatgagcctgtacttggctccatatacaacatttctcccatggcacgcatgatgaagaagatgaaaatacctgcaattgcataagcaagcattactgacggacctgtccatttaattgtgctggctgatcccataaacaaaccaacaccaatcgttccgcctaaagcaatcatttgaatatgacgtgcttctaaacctcttttcaattctttgtttgccacttcacttccccctcttagatgattcatagccgcattttaacacaagatgctttcccctaactcctttcggccctgaaaatgatgaagcaaacgtcattttacactagctttaaagctatcctaaaatcgttttgtgctcctaataaaattctcaaaacctttcatcttccaatattctataaatcttaaaattacttatcttatattaattcattaatctgaaaaattcaattattttttcaataaattattatacataagtctgattaatttttaactaaattaacaataaaatacatctattcaatatgattccggcatgtatattattacaatataaataaccgaggagatgctatcttcctcggtttcatatctcaaatacttcaacctttatagttgataacgtaatttcccacacattcgattcatataccaataagaaatttaatatattaataaactactaacttctttaccccagccaaattttgaggcagaaacctttctgcctcaaaacaacgggataaaatataaaagagtctcattaaaaaatgagactcttttacaatttcatatttaaatcgatttcgaagtttgcttaccaaagataaataccctagtaaacactgccattataactacaataactagaaaataaagtggcatcaccagtaacgagcccgtatgcaattgactcattccccaaattgtcatcgttacaattacatagtatcctaagctaaacaacgctccagctgtaccaatgacatcttgaaaatctactaacgctaaacttaaacaattaggtaacgctactccaattcctaatagcaatataaacatcgctattaaaaatacaaccatatatattacattcggatttgatcccacaaacgtaataacagataaaaagatagctcctcctgtcattacgagacaaccgatatatataattttctctggtttataagtagcaagtaaacgttttgaaattttcgctccaacaatagaagcagacgctacaacaattcctagaaatccatacatactaggcgataattgaaaatattcaataaagataaacggcgcttctgcgtaatagctaaataaaacaccatttgctcctccaattaacaacccatatgttaccactttcggatttgtaattaacctcttcaagactgaaaatacatttattttattcgttactgagcccgtttttgtttcaggaagagaaacaaacgtatacagaaaaataccgatactcataactactaaacttaaaaatactattttaaatccaaacatttgatcaagaaagccaccaattaacggtcctatcgctggtgtaaaagcaatgactgccgagatttgagcaaacataacatgcctcttatgcccttctacactttcacgaagaatcgtttgcgtcacaactgatcctgcacttgctccaaacgcttgaataaaacgacttaccaataaaacttcaatggaatttgcaataaagcacaagaaactcccagcgccgtatacaacaattccaaataacattgcccagcgacggccaattatatctgatagccatccaataaaaaatacacctaaagcaaatccagcaaaatacacactaagcgttaactgcacctcattattacttacatgtaacgcctttgaaatgtccggtaaagacggtgtgtaaatcgtttcactaatttgcggaaatgcgacaagaataatcattaacaaaagtgatggtactgagacttttttcatttttcataccctcctataactttgaaaatctcagaaataaaaagactttccttagctacggaacaggaggggccattatagaaatccggtcataaaacaacaaagaaaacacctcaattacgtatgttaatacttataggagggtaatattaacatcgatttttaaatatactttttcaattatattacatattaattttatttttctagtattatcatttcgaatgctctttttatattagtgaacaaataataaacgccataaaagataacaacttgatatgaacgccttattatggaataattagaaatagtttgaattaataaacctgattataaaatgatagactcatatattcctaatgtcataaagttgaacaagtaggaggactttcgtaatgattgaaattttaaggacagtagtaaacttcctaatttctctattctcaggagaattaccctttgtgtattatgtatggattattaccctattcctaattcaaataatccaatctactctgaactataagctttttaacaagaaaaacaatttcagcacttatatatcggaaggattacttgcttttattattttattgtttggaggaatattagtatctaagttacttgcttacataatagacgattctactattagtatgacgaatttaacacattattttgtttctcttatcatattaactatatttgttgtaataacctgtgttaaagactttatagaggcatctataaagaataaaaatatatctcttttgagctttttagtaatttccttcataacaagtatactttcattcaagtttttatcacctttaattgaaggttctttttctctttctaaatcttttataactactttaatcattctagtaactatatcaatccctctattaatttccttagaggataagtatgcagacgaaaaggaaacggaaaatttatagtttctcatttacataaaagaaagagggagctcccctctttcttttctatcgttctatttcacaagactaaatcattccttttaatattaatcctaaaactgacattattatcgcgctaataataattcgcaaaatccaagtagtgtttgtacttattttttctaattgcttattgattgttgctatatctttctcattaatagtggtacgcgtttctaaatttcgaatgtctctcataatttctttttgctccgccttgagattgtcaattttagcgtaaacatcttccatatattcacaccctctgttcatcttaatagaaaaatctatatatattatgagacaaccctcttatctgtgaatacgttgcgtatatccgcgtaccaaattttttgtacaatctaattgaattactcacacgtttccattcttctatttataaattagcgttgagatacattaaaattagaaaaggaatcccttgtttatttaacaacaaacaaggtgcaatccaccattcgggagcacctacgataatttctattgttttcatatttacaactccatataatcagtatgattttctgaagaagccaatttttgaactgcttaaagtatactaatatgaatacgaaatagctgtattgataaactctctagaacaataaatatactggctgaaacggatctatatccaatattttttccagtaacatgaatggttatttctgataaatgcgtttgtacatcattgttttcaaaaatttcatcctcaacctttacaatatctgcttcacaatctacttctttaaaagttttcaataattttgtttccaataaactacaatcaaagctctcatcttttattacggcaaatttaaccttcatatcgatttccccatttttaacaaactaaaatcactaaatcaatataaatatatattattctattaaataattcaaaatatacgcttcttatatacattattaaaaataggttctaaagaattaaatgaaaaaagaaattacatatacaaatcccctctttcaaccaatcaatatagaattcccttatgcccaatgattaaaatcttttcatattaaagccgtagattctaaggactttttgtttttatattgataagtcatttcttgaattttgtatcatcggaattaataatatagtaaaacaaattaaatattaggcgttcaactaatctttcatataattcgtctcttaattattttgctcattgcgcttttttattttcctcactatttcaactaaactttgtgtaataatacatatttcaaatacattatttcctttcactcatacttttatcattgagtttttattcacaaattcgtaacacatatatatgagttatcatgctaaaattagtttattcacaaaaagaagttcttcttaataaatcaatcatttttaataccctgtttaaagccttgcccccctgcaaggttttttcctatttaaatagagtagtagttttcgttatgcttctctcccccttgttccttaccctacaaataatacttcatatttattttaatttttcagcatccgtactcgctctgttcgagagctctttaccaaatattcaatctaatgataagattgaccaaattaatattttcgtccataactgtatcaaaaagtacactaaagaaaaaatagcactctcacaattaagtaaacgcgagctttttcttctatctacttactatttaaggttaatagtgatataaccagatttaaaaattcgacttaaattcattgatgaatggagaggtttatatgaaattgaaagacaaagtagcaatcataactggtggtgcaagtggaattggcgaatctactgttcgtctttttatcgaagaaggtgcaaaagtagttattgctgacttttctgaacgtggaaaagaactatcagatgaattgaatgcacatggatataatacgttatttattaaaactgatgtaacaaaagaggcagatattaaacagctaattcatgagacagtaagtacatacggtaaattagatattatgtatgccaatgccggcgttgctgatgatgcaccagcaaacgaattatcctatgaaaagtggaaaagaactattgatattaatttgtctggggtattcctttctgataaatattcgattgaacaattccttaaacaaggtacaggtggtgtcatcgttaacgctggttcgattcatagttttgtttcattacctaccccaacagcatactcctctgcaaaaggtggtgtgaaactattaactcaaaatttatgtactgcctacgctaaatatggaatacgtattaatgcggtgtgccccggttatattgacacccctttacttggtagtgttaatcctgaacagaaagaatatttagcttcacttcatccacaaggcagacttggaacaccagaagaagtcgctaaagctgtcttatttttagcaagtgatgatgctagttttgttaacggtacaacacttcttgttgatggaggctatactgcacgttaatttaaaaattttgaagcaccctaagaaatatatagtcttcaacaagaaaaagcgccatcacaagtgacggcgctttttctatgtaagagcaactagaaggtatccttctagcctactcccatttataagtccaaaactgttcaagttgcagccattttaatgttgctgcatctttgttttttatttttgcatgcgtgtcttcaagcattgcttctgtttgtgaacggtgcgcacctaatgcagttaatttatgatcaaatacttcactaatgttatttacaacatccggttctcctaatactgcttcacgatttttcgtaatcgcaacagcatggataactgggcgctcttcttttggcatacgtgatacagcgcgaacgacagcgcggccaaatgcattatgatctggatgtacaccgtgctctggataaaatgtaataattcgagatggatttacttcttgaataattgcttcaattttgtcagcaacgaaatcaacatcttcaaattctaacgttttatcatggaagccaagcattcttaaatctttaatacccatcgcttcacaagcatctttcaattctttcttacggatatgtggaatcgtttcacggttagcgaatacgttcttacccatgttacgtcccatttgtcctagagtaccacatgcatacgttacaggtactccttgatctgttaataagcgaattgttcctcccgcagcatatgcttcatcatctggatgcggaaatacaacaagtacatgtctctccataagtttccctccttcttacttaaatggtgttaagcttaactcaagtgcaactgctagacgacctaaattatcatgtccagctaataataaacgctcttgatcgtctacttcccagtgcgtaataccttcagcatatacccaaccgtgatccattttcaaaccaactcggtatggatttgttccagttatcttcccgcgttcaaaacggataatcgcatttcgaatgaaagcaccaactgtcatcatcttttcatttatgtgtgatgcatacgctccgtttgtcgtttctaaatgaatatatacatctttatttacaaaacgttcaatttcattttgaataagagaactatcttttactatttccatcggaattcacctctttaaaccattttacgcaaaaataatgtaaattgctatctctatattagaggacaacgctcacttttcctaataatttgcactgtgttttttatatgatatgtaaaaaatacattttttccttcactttgttaaatagttttctttcttttttgaatttgctacaatatattttatcccgtattattgcagcgagatacatttcgacaattgaatacataatttaaagaaggtgacatgattggaacagtcagcacatgaagtagcaaattggcaatattattttgcaattgccgtatttttaatcacgtacggatttattatttctgagaaattgaatcgtgctgtaatcgcactattcggtgctgctattatgattatttttggagttgtagatttacatactgctttcacatcacatattcaatgggaaacgattacccttttaattgggatgatgattctcgtacatattacgagtcaatcaggcgtctttgaatttgtggccattaaagcggcaaaagcagctggtggaaaaccgattcgcattttattattactatccctattaactgctgtcggatcagcatttttggacaatgtaacgactgttttattaatcgttcctgttacattatccattacacgtattttaaaagtaaatcctgtgccttatttgatttcagaagtgctgttttcaaatataggcggaacagcaacattaatcggtgatccacctaatattatgattggatcagcaaacaagcatttagactttaacgcctttttacttaacttagctccaatcgtaattattatttctatcgtgacacttggcattatttacttcatgtatcgtaacaaactaaaaacaacacctgaacaaatcgaaaaactaatggcattaaacgaaaaagattacattaaagatcaaagcctccttttaaaatctatttcgattttaggactaactattttaggcttcgtacttcattcgattattcatgtagacgctgctgttatcgcgatgacaggcgctacacttcttatgttaatcggcgtgaaagaacatgatattgaagatgtatttgcccatgttgaatgggtaaccattttcttcttcgccggattatttgttctcgttggcgggttaattgatatcggacttatctcttcacttgcaagagaagtaatcgacgtaacaaacggtgacatcggattcgcagctatacttattttatgggtatctggcatcgcatctgcgacaatcgacaacatcccatttgtcgcaacgatgattcctcttattcaagacttagctacaggactcggactatctgtcgattctccgcaaatcgaagtactatggtgggcgttatctcttggagcttgcttaggaggaaatggaacactaatcggtgcatctgcaaacgtagtcgttgctggtattgcaaaacgtgaaggacatggcttctcttatatggacttcttaaaaattggtttaccattaactattgttgcactcttgttatcacatgcttatatatatttacgttatttaatgtaaaagttgtattgcatgaaattatatcgtcaaatacaaaaggtttgcagcatccgtgctgcaaaccttttttcatcaccaaaatataccgataattgctaaaccacctaaaatcataccaccaatttgtccgacaattgttggtgataattgaacaccttttctcacttcaacaactggtctttcgtgccttagttgctgcacttcactttgaagttggtgcacacttccgtgtaactctttaataagttcttttaattcggcgacctcttcatttactggttttgccttttctaaattcattttacatgactccttataaattcaatcaacacactgtaaattttcgccaattaccattatatctcctgcatactacatatataatttcgaatgtactttctaaccttgcagctctatccattcatcccgcaatatccccataatcatacggtcaaaacacttcccatctctttgaaccgcttctctcatacagccttccatttgaaaacccatctttttatacaatgcaatggcaggtttattatacgaaataacatcgagaccgatgcggtgtaaattcaattcatagaaagcatactttagaataagatgtattgcttctttcccatatcctcttcctctatcattcgcatctcctataccaatggctaataaacctgttttgttattccactctataccatgaatcgccacaaaaccaattaagcgatcttcttgaactgtccttaccatgaaagaaacactattcgatctccgtccttttaataactcatcacttgctatttcttgtaacgattgcggaaacgctacatctgtatcgacatttcttaaatactcactatcctcttgccacataaccattactacagcatctgattctctaatagcggataattttacaattttattttgaaaaagattcatcgtcatttcaaactcccccttttttaataacggggatacttattttagcctatttatccccttgttccataaactgctttataaacgggatacttacaataagcgctgacattggcacatctcctctacacgaaattaacttcattgtataatttttcgtttattctaacaataataaaaagccctccaaatttagagggcctttcctaatagcaaaactatattatttcgtaaacattttctctgcttcatccattgccattttgttacctaaagcagaatagtcaagccatggttggtcattgataatatatacatgcttgcctttaacagcttttaagtctttccaaattggtgtttcttgaagttgtttaaatgcagcttttgctttatcatctctatttacaacaacgaaaatcgcatctgcatcaaagtcaggtaatacttcttgtgaaatgacttcgaaaggacgttttccattgattttctctacaccatttgcaggttgtaatcctaagtcttggaataaaattggtcccatcggtcttttcgtactaaatacacgtaattcttttgcagtaacgcgaattgccattactttttcgttattacctagctctttatctattaaaccttttactcgttttgattgctcttcgtaatcttgaatatattgatccgcttctttctcacggtttacaagtttaccaacttgttttaaatggtctctccatgtaccttcatctaaattgaaagtatgcgtttttgcaattttttcgtatttcgctacatctttaccagcatatttttcatcaacataaatgtcagttggctttaattgaagtaacgcttccatattcggatctgttacaacaccaagcttcttcgtatctttcaacttctctttagcgtgcggtaagaaatcttttaaatctccaccaataacagaacctactggtgtaattcctaatgcaagtaaatcattcgttaaatgaatagacatagaggcgatttttgggtcattactttttttcgtttttttcgttgcctcttcattagatttcgtttgaccacatgctgctagtactaaaatacacatgatgctaaataaaatagtaagtttctttttcatatgttctcctctttgaagtatttattttgtttttgtaagtaaataaagaaaatacggcgctcctaaagctgccactactacaccagctggaatagagtttggctcaaatatagaacgacctatcgtatctgctagcactaaaataatcattccgataatgccagctagtggaaggaaatgttgatacgtagtacctactaactttcttgcaatatgcggagcaactaaaccaataaaaccaatccctcctgccatcgatacactcgcgcaagataatccaaccgctgtagctaaaaggagtaaccgttctttttgaacagaaacaccaagtcccgctgccacactatcaccgagtgacaatgcatttaacgtttcagattttagccatgcatacggagttagtatgaaaatccaaggtaataatgcaaggacatgaatccaatcccttccccacacgttaccaactaaccatctagaagcgaatgtatatgtctcatcatttaacttgagagagaaaaataacgaaattgcactaaagccagctgaaaccgcaataccaacgagaataagtctaatgggaagtaaaccttttgatcgatcactcgcaagtaaaataataagaaatgcagctaatactcctccgccaaatgtaaataacggtattaatatcgatgcattctcattaatagaatgaaagaaagtaacgaatataattagcccgaaagatgcacctgaatgcagtccaagaataccaggatcggccaacgcattccttgataacccttgcaaaatcgcaccggaaatcccaaggccaataccagctaacattgtgattataattcttggcatacgataatcgtacagcacggttgcactctcaaaatcaccatgaccgaaaagcgtttgaattactttgagcggtgcaatgctaagtgtccccgtatttaagctaagcaaaatgacagcgatactaatacaaccaaatattgtagttacagtaacggctctcgttttatctgtgtttaaaatcttcttcacttacaactccctcccaactttacgtgctatatagaggaagaacggaactccaacaagagccaccataattcctatcgccagttctttaggagggtttactgttcttgcccctaggtcagctaaaactaataacatagcacctaataatgctgacataggaataatgagtcgataattcacaccaactaattttctagcaatatgcgggataactagtcctacaaatccaatagagccaacagctgaaacagatacacctgcaagaatgactactataatcatccctagtattctcgttcggttcgtttttactcctaaattcgtagcgacatcatcccccattgatatgagtgaaatagaccgccctaaaattgtcgcaaaaacaattgttatgagaataataggaactaaaaatttcaagtgttcccacttaacccctgcaacaccaccagcgtaccaaaaagctaaatcttgacttaagtcataataaatcgcgacacctgaacttaacgaatgtaaaagcgcagccataactgccccagcgatcgttaatctcatcggtgttaatccgcctgatgtggccgatccgataataaaaatgagtactgtacttaagaccgctccaataaaggagacaatcattaaataggaatacggcatatgcggaaaaaaggcaaaactaagtgctactacaaacatcgcacctgcatttatgccaagtacacctgcatcagctaaaggatttcgtgttactccttgcataacagccccagcgaccgcaaaagccgctcctacaactgctgcgccaattacccttgggagccttaattcgtaaatgatttgatgctgcgttaatttcggattgtaatcaaaaaccgctgtccacaccgtttgcaaatgaatatcctttgcaccaaatgcgacggccaaaaatatagatccaattaaacatataattgttaagctcataaaacatatgaacttaatatgtatccagcggttattgccagcatgtatagtagacttatgtaacatgtttcatttcatcctttatatgcagttgttttttataattatttttaatttataatcattactgataataattatcattttcatttagatattatatcctcactttttttaaatagcaaactatttttttacttcgttaaatattaaaatacttattacaattcccttccaaaacttacaaatacacgcaaaatagaatactagcttatttttaaaagtgtagtatacttaatcattattttgagttttcaaataaaaacatccaaggtgatgcaatgttatatataaaacaactactctattttacttatgaacaagcattatcctgcttattcccagtcgttattttcttaacactagccctttcaaaaatcgtttcgatcccagggttataccgctacgatttcatactcatcgtatgccttcttatgcagtgggttatgtacaagactggccttgagacgaaagacgaattaaaagtaattactgtcttccacctcatcggccttttactagaaatatataaagttcatttcggttcatggagttatccggaagaggcatattcaaaggtttttggagttccactttacagcggctttatgtatgcaagtgttgccagttacatatgccaagcgtggagaagattgcatttacaaatgcatcattggccgaaagctatttttgtaatacctctaggagcactgatttacttcaattttttcacacatcattttctatacgattttagatggttcttaacgttacttctattcatcgttttctttcgaacatttgtggaattttcattacgaggcgttacatataaaatgccgctcgttctctccttttttcttatcggattctttatttggattgcagaaaacatcgcaacatttttcggtgcatggcaatatccaaaccaacgggaagcttggaatctcgttcacttaagtaaaatcagctcatggtttttactcgttgttattagcattatgattgtcacgcagctcaaacatttgaagcaatcaaaaagataatgctaattatgtaaaaacagttagcccatcaatcattagagagtgatgggcttttttttagtaatattttttaaaccaaccttatcaaaggagttataatttacaagagtataagcagttgcacattatgaactactactagcagaagatgttgctgcagatgaagcggcaatcgttgccatcatagcagcctgttgtgcttgtatgaggacttctatcattgtttgtaaacctgtgttggtagttttactttcctcacctttctgacttacgaacagttgaatagcaataagaatatttgtatctgtatgccaacggaacaatttatccccctgcaatttttcaataaatgctctaatagaatgaatctctttttctccatcctcgagtaacgctagtaacccgatagctgggtaatgcatctgttttacttttaccttttcttgctttaacaaattccatatatttgtgcattttgcgactaacagttcttccctgacatccttctttagtgaaagaatatgactcaaaaattgaagatcattccctttatgcaaaccagctgtcgctagtttctgataaaggcgttccactcggtccataagtgtgtctacattctctgattgtcctgctaataaaaccgcgagcggataatcatttgtacttgtaagaaagaggtgatcctttttcatgcgtttatatacttgcattgagcgttgaatgtgcgcgccatgctgttcattttcttctgttaaaagtacagctgctgcgagataagtaaatatactgcggctaaacccaccagtgaccaattgttcatataaatctaaaaactcccgaaaagctttctggtaatctgtaaagtgaatatctaatgttgctgccactacaaaacgatgataagactttaagtatgaaaacatccctacctgattcttaatataactactaatttctaaaaaacgtccgcgatcaaacagtttatcactacctgcatacatagcagcaatcatcattcctgttcgagaatcgctcgttttccattttagttctccctttaactgtacatatgtatgtttatattgctccaacttttgctctaatgtaatcatagtattcacccctatttctagttcttctctatcattatacttatattccatatttaggaatactacaattaataatcacaccataaaaattataaaatcctcttatccttcttcatcagcatcacgatgatactccctaatccttcaagaagttaaacaaaaaaggtagataataatttatctaccttttttgtttatatcatttaacattacacctgtattgcttgttatatgcaattaagactaaagagctttaataatacgttccatcgccttcatttgtccaatatgatcagcttcatgataaagcatcataccgtaaagctcaccaactgtttccaatcctagaaatggctctggcagtttattttcaaatgcttctgctggaatttctttaatacgttttgcttgttcttttaattggaccgttaacacttctaatgatggtccttctgttgtccatttagatggtcttgatccatatccaaacatacctggatattcagttggtaattgtttgaattcttttccaaacatgaaaacttctgctgccgttaatacatgaccgatatgccaacgaattgtattgttaaaaccctctggctgcgtatccacagttttatcatctagcgtctccataaatttaagtaatgccccgcgcgttatttcaaattgttttagaccaattattctattcattttatcgttctccttcttcatgtacattttattatgaactaagaatgttcaattcattaaagtttcactttgtttaatctatcagaaacaatgaagaaatacatctaatatgcttagtaaaaataataaaaaggttcacctctcgtacatatagaattacttattacacaaatagtttagtaaataaaagaggagtgttaatttcatgttacatgttttaaaacagcaatataatcttattagctctacaagagaaactctattttcgtttttggaagaaatcccagtagaaaaattacatagcacagttcctaatttcgggagcggtagcattataaagactcatattcatgtagccgattgctaccgatactggcttggatcattcgcatttaaacaaaagcgagtagacttttcatttgctagcgattacgaaattgagcatgcagatgtgaaaaaagttcgcgctagatttaagttagtagatgagactgtacaacgttttttagatgaatacaatgaccgttggctcgaaaatattgcaaatgaagtaaagtggcaaaaagggccttggagtacaactccgctatggcttttaactcatacggaaacccatgagtttcatcataaaggacaaattgtatcaatggccaggcaccttggatatactcctcctgatacagaccttagttaatacattcatgttcatttcaaagcggaatgggcagcaagaataatagtatgatcaaaaaactcgttgatacattttgttgtgtataaaacttttattatttgttttaggtataccataccattataaaattcatgtaacatcgaattaaggttcatattttttatgtaactcattgaagaaagtttaagtatttatacattcaattactaactaaaggagaaaattataatgagattagagagcgaaagaatttatttaaggcctctttgccagctagatgctcctattatattagaaagtacaatggatgatgaaataagatatatgactggaactaagtccactttttcattggagcaaattacgaaacatatagatcatataaataatgattcaagtcgctatgatttcgctatttgtttacaaagtactgacgagatgattggagagttgtcgcttttagatatcgatgaggagaacgaaagagcaggattcagaatatcaatgctttccatagcattaacaggacaaggttatggaactgaagctattaaaatcgttttaagatttgtttttgaacaactatcattaaatcgtttacagttagaagtatttagccataatttacgcggaattaaagcttatgaaaaagttggttttgcaaaagaaggaaccttacgtcaatctttattttataacgatacatactcagatgaaattattatggccatacttaaaagtgattatatagagagacctttgtaaatgaatgtacttaatctattaaacaattttaaagaaccttaccacaataaaatgcagtaaggctctttcatttttatatcaaataacagctcttaaaacatgtataatcgtatcaataccaaatagtctccgcataattatatgcatcactattcggaattgcatgtttcccctgcgcttgtgcttttcttggatctaaatcatataccattggcgtatagcatgatgtttgccctttatttacaacaccatttcctccagcacttccgcaagtgtatgcctttccatctgtttttctaacaatccttgcatcagcttcattattataagtaacttttgcccacgctgttttacacgtcgtgctaaattttaattccacataagaatttgaatcaatccacttcttttctttcgttactgctgattgatcacaactattgtaatacggacttttcccatcatacgaatggtcttctgcaaatgctttatcattattggtcgtactaaacacactagttacgacgagcaatgccagacaaagacatgcgcttacctttttaataagtttcacaggattccactcctttattaataacgtccagttttcccgtaaccattattaatcgtcactgcttcggcatcagctgtataaccaaaatcagcagtcaaatcaaacaccattcctgtataagtgctcgtttgccccgttttaattgctccattaccactattagaatctactgatttttggaatacaccatttttatatttattaataacagcgtaagcatatactcctccagaaacagaaggtgctggttgatctaaaacaagcttagaccatgccgcatgacatgtattactgtaacgtaaatacactgttcctacttttttactaccttcataaactgctgtagactttgcattaaatccatctgcatcacatgttgtacttcccccgtatactttcgttgttgctggattttttccgtcataatagctactcagatcagtagctgcaaatgtactttcttgaaaactaaataatacccctacactcgctacacttaacacacatactttcattaactttttaaacatttttaattccccctcaaaatgattatgtatactaaacacaacctatactgctgtgtcagccctccttccatgcttcctagaggcatcttacaaaaacgaattaacgttgtaaattcccttatgattattggaatatacgaagaactttacttatccttgtaagaaaaaaagttgagaaatacacattttatagcatcctttatttaaaacataaaagaaccgatacttgttatattcaagcatcagttctttatacaaaattgccattttttcttttatataaaataaatatttctccacttaatttgttgtaaaaaactccctcgttacatcaataaattgctgcagtggtgctgtcatccatttatctttatgccaagcaatttgtgtataaattggaggtattgtttcgtttaacattaactcctttaacgtcccttcccgtatatctttttctactactatcgctggtaaaacggctatacctaaatctgcaataacacattgtttaattgcttccacactaacaaactcaattttatttgctggatatagatcttccccgcgaaatagctcttcaaataaagttctatatgagcagcctaattctgttaataaaagtgtttcactctctaaatcttttatagaaacagtagtctgttcaagtaaaatatgccctggagcagctactacttttaattcttctttcataagtggttccacatgtaaaacatcttctgttttacattcgtccaaaataaatgcaagatctacttttccctccatcaattgttccttcgcatctttattggaatgtgctggtttaaatataagctttattttggggaattgtattttaaacctctttaatatagaaggcaatctgtatgtacattgactttcttgtgcaccaattattaacgtacctgctatttcctcatcatctttcacggccgtctttgcttcgttactaagtgcgattatcttgtctgcatatagttgaaactttcttcctgcttcagttaagaaaagacgtttccctaatctctcaaatagtggtgtaccgagctcagcctctaacgttttaatttgtgctgtaacgctcgattgagcaaagtttaatttcttcgcagtttgtgtaaagttcaaagtatctgctgctactttaaatgtaattaattgttttatctccatttatcatccctctttttcaatcgatatttccgattgatttcatcgaaataatcctctttgtctattgatatttatattgtatgataaagagcatcgacaaacaataaaatggaggtattccatatgaaagcactttgtttcgaaacattcggagatgctgatgtacttcaatataaagaaatccctgatccaatcattaatccaaatgaaattcttatcctcacgaaagcaatcggtctaaatttcgcagatatttatagacgccgtggtgattatcacctcgctggtaaccctccttatatattaggttatgaaggcgctggtatcgttgaagaagtaggtgctaacgttactactatcaatcctggagaccgtattgcatttgctgacgttccattcgcaaatgcagaattagttgccgttccagcagaaaaagcaatcccgcttccagattcaatttcttttgaaacagccgcttctatcttattgcaaggtctaacggcacattatttaacgaaagatagctatcaaataaaacaaggtgatacagctttagtccatgctgcggctggtggcgttggtcaacttcttattcaaatgattaaactactaggcggaaaagtaatcggtcttacgtcatcaaccgaaaaaaccaaagtagccacgttagttggggctgatcacgtatttttatatactgaaaaatggcattcaaaagtacttgaaataacaaatggtactggagtaaatgttgtatatgaatcagtaggctctacactagagaaaagttttaacgctactaaaatcggtggtactgtcgtattttacggaatggccggtggtaatcctgcgcccattgatccacgtatgcttatggatacttcgaaaactttaactggcggagacctttggaacgtacttactacttttgaagaacgtaagcagcgctctactcaattatttgattggatcgctactggaaaattgaacattgcaagtcctactacattctctttacaagacggtgcccgtgcacatgaattattagagagcagaaaaagtactgggaagattttattgatcccataattcataaaatgaaaagaaagctagattaaaattttgtgaagacctatagtgaaaaaaattgataaatgaaaggacataacatattttatataactaatatgttatgtccttacttcttcaaataacgatcccatgtatcactcgaataatttttgagctcttttctcaattaaaactccctttaattgcatatgttcttttatttgtatattgctagaaaattatcatttttatttatgaataaggctacgtaccgatttaagctaaaaactagattttgatcctataacaacagtggcatctaattcctcatctctagtcactttcgtggtaagcccagcaccagcaaagatttcaaaagtctgagttgcctgcatttcactcgtctctattaaaagatgccctcccgatgcgagccagagaaatgcttcttttgctactcttcgctgaatgtcgagtccatcctctcctccgtctagcgccattttcggttcatgtagacgggcctcctgtggaagcagctttattgtctcggtaggaacataaggtacgtttgcaactagggtattcacatggcctttaagtgcgtgaggcaaagctttatacaagtcaccttcaaaaacatggccaccgaaatttgttacgttgcggctagcacatcgtactgcgacaggatcaatgtcaacagaatacaattcaattcgtcctaaagctgccgccagagctacacccacagcacctgaaccgcaacatagatcaacgacgatatcaccaaagcataacagagcttctgcttggcgaacaagaaactcggtacgttgacgaggtacgaaaacacctcggtccacttctatccgcaacccacaaaattctgcgtatccaacaacatattcaagtggcaaaccattggctcgcatttccaccattctcttgagctcctctggagttcgggctgctgaaataagtaaccgggtctcttcttctgcgaaaacacaacccgcgctctgaagtctgttaattatacatttttccgttttattgtccaaaaaggaattacattcttttcctatttatctcaccactttttcttatttataaccctgtattcgctaaaaattggatgtatcctttttaacaaagtggtcctattcaaaaaaatacgcccttattcaattaaatgacccgattgttgaacaaagaaacgttctacacaatagaaagtttcattataatatcccaatataaccttataaatgatgcactaaaaaataaaaaggaagctagattttactaacttccttttcttatatctatttaagatagtattatatttccacactttctttcccttttgcaacataactcatatctccaaccgactccactgtgtatgttccatcttgatatacaatcttcgtcacgctagcattttccactccaagttttgttttgctactgtctaacatttctattaaggtagtaatcaaaagcccatgaacgacaactaagacgttaccgccaccattttcagcagcttcttcactaattttatctatctctgtttttatacgagtagaaaacaattcccaatcttccgcctgttttgtcggatctgctactctaataagattaatcacttcttgaatagaaagcttcaagagttcttctggtgatgcaacgcctgcagcttttccaaccacatcccacatattctcaagtttttcaccttcaaaaataccgaaatttaattctcgcaaatcttttctttgctcaagttttaattttgattgctcactatattttaatactaaattagcagtttcaattgcgcggccgctatcactactatacgcattcataaaatgaatatcttttaatcctgttcctaaatttgtggcaacttcaacacctctttctactaaaggagaatctgcccaaccttgcgcgcgatgattcgtatttaatattgttttaccgtgtcttgtaacatataacgtcactacattctcattgctatgtgtttctcgcttattcatttcattctctccctttacgtttctatatcaattttaccacctcaattattcattgagcaaaatatacgtcagtagatccgcttaataaaaaaagctatctttctgtatatccatacaaaaagatagcatcttttatgattacatttcttaaccggtactcctattcagcaaaagcactcgaatattgtacaattccttctacacctcgaagagaattttctgttaattccattatcataaatacctcttcaggcacttcaaacggtgcttttacattccactcacttgctttcttaaaaccaaatttcgggtagtactctggatgtcctaatactacaactgatccgtatccaagttgtttcgctttttctaaagcagccgtaatcagttttccaccaattcctttcttctgatggcccctagcaactgaaactggtgcaagtgctaacgattctacagaagttccatcttgttctatcgcaattttagataacataatgtgaccgactatttcctcatctactgcaacgattgataactctgaaataaatgcgtcacactctctaatacgttttacaagttcatgttcctttttatcactaaactcttcatgtaaaaatgcttcttttacaacttcttctgtttttctataatcatttttttgttcttgtctaatcgttaccattttaacttatcctctattctttcttatttctttttgaattttacgaagtgcttttttcgatccgcgctcaatatcgtgttgcatttttctctctttataatcgacaaatagtgtatttaaatcgtatccctctggatataactccttcgctgctacctctaaagtaatacgttttacatttacttcaacgaattcaccgttataatatacaacgacgttataaaaattatctttttccttatagatgataccaaaatcatcataatctaataaattcacacgatcgccgattttgtactcataatgaaattctcttttttcttgtacaaatttcggttttctaattttactttcattcactttttctaaagcgtactctttatttcccatgtactctttcgctcttttcagcacatgttcttttacgctcattttattcgcaatccaaagtgcattactttctcctgattttccgataactaatttataaagcggctctagcgtttcactattaaactgcatcgctgcattcataaagtcatcgtgcatttctgagaatcgtttaatttctccgtaatgcgtactcgcaacggtaatacatcccgtaaggtacaactcttctaaaatagatattgcaagtgctgcaccttcatttggttctgtcccgctccctatttcatcaaataatagcaacgtattattatttgacatcctcataatctcagaaagatttttcatatgagacgaaaatgtacttagtgcattttcaatactttgattatcaccaatatctacgaatacattttcgaaaatagcaatttctgtacctttatctcctgcaatatgaagacctgacattgtagctaatgttaacaatccaatcgtttttaacacaattgtctttccgcccgcattcggccctgtaataattaaactacgatactcttgaccaattttaaaatttaagggtacaacttgccctgttaaaagcggatgcttacaattcactaaatgaatgtagccatgatcatttaacttcggttctattccatcaatcgatttactaaacttcgcttttgcaaataccatatcatactgactaattagctccatattaatctttatactataaatgttttctaacaccattcctgataaagtcgctaaaatttgatattcttcaaccgcttcttctgctttcaaacccgctagttccgcattcaatttcgtaaccgtatgcggttctataaatacagtagaaccttttgccgaggcttcaataatacttccagcaacttggtttttataggaagatttaattggaatcgtgtaacggtcatcctttttactaataaagaattcctgaatgaatttcttatttgcactactatttaaaaacttcgttaaacgttcttttattttcccatctacagaatcgatattatttcgaattcgttttaactctttacttgcagctgcatcaatactatttcctttaattgaaaagttaatttcctcttcaatacttttatattcagtcattgaatttgcataagaagctaatactggtgcaaaaaattctttatctaacataaactttttaatctttctacatccgcgtaaaaagtctgaaacactgactaattcttctggatctaaaatcatccctttttctaatttttgaattgtactagcaatattagaaatgccgaagaaaggaacatgcccttctgcatctaatatagctcgtgcttctgtcgtttcattcaaccgatttctcactacttttatactcgtactcggctctaatttgtttaataattccttacctaatccacttacacaataagatttcactatatcctttaattcgttatattgtagcttttcaaaagtcatcgtattcattttatttctcctcactatgattgatttttatcataaatgaagatacctactcattagattccaatgagtcatatataaaattccataattatacaataaaaatatatacaaaaaagctgcggggataccgcagcttttacatttacaaggcatttgtaataacatatgaggaaatatgccataaaaaatagatggcagtcccttattacacgctttataaagtattgtaggtatcttcataggttttgaaataaatgcatgacaaaattaggggtatgatgtacataaaaataccctggtcttatccgatttatttcattaaatttttcctatttaatacctaccgcactcacaaaaagcacctctcattaatttatattatagtcattgaaatctaatttattgaaatcatcatactatatgttacgtgagaagtaaaggtgtcatacttttataactatacagaatgtaaaaaggaataggaaaacttatatttcagtctacctcttctttttcatcaccaaattactgctgaacatatatggaaactgatcctccacttacttgaaactgcccccatccgtccttattaattgttacagtattcgtttgattacccgtaatatcgtaccatacttcccctgcgttattctttccaacatccatccactttgcccctcctggtccatcagagattaatgttgctaaaccagaattagcatgtacactatcaccttctcttgtccagccaatcacatctggatgatcaaaataatcacgctgcgtaccatatgcaaagttttttcgtgccgtcaaaatcggatcaattttgtcctttaacgctggaatttcatagttactatttccttttgtaccatagtaatcaccatagaaaacagaaggatacccctctgcacgcgttaaaataaatgcatatgccagcggcttgaaccaagggctcactacagattccaatgactgaccaggctgtgaatcatgattttcaactagagtaaccgcaagtgtaggatgattcgcaactaccgttccttttaaaatatttctcatatcataatttccatttcctgttgaagcataatgaaaattataatgaagtggtgcatcgaacacagattgattataattaaccttcgctaaataattatttaaagtctggatatcattttgccaatattcagctactgtaaacatttctttccctgtttgctgtctaacgtgatttacccaatcgcgcaaatattcatgatcaatatgtttaacagcatctaaacgaaaaccatctaaatttaattcattcgcataccacgttccccattttttcatttcattcgcaacatctggatgatcaaaatcaagatccgcatacatcaaataatcataattcccattctcgctagacacttcccagtcccatgctttacctatgcccctaaatttataaattcggtttaatttccttccttcatcccaatccgttccgtcaaaatgataccatttccatttgaaattagaataagaatctccacgccctggaaagttaaatcccgtccacgcactaatttcataatcacctgatacttcaatattccgattgctcgggtctacctcaactgctgtgacagtttctgtataatcagccccacctttatgattcataactacatcaccgtatacatcgatgtttttcttatgtaaagcgtcaattgcagatttcaattgtgctttcgtcccatacttcgtccgcactgttcccttttgattgaattcccccagatcatataaatcatatgctccatatcctacgtcattttgcgtagttcctttatatgcaggtggtatccaaacagatgtaattccttttttcgctaaattttcagcatcagtacgcaaacgattccaatgattcccatcattcggagcataccactcaaaatactgcattaacgttccattgttaactgtgtctgcatatgctttactcccgtcatatatactaggtaaaaacataacaactgacaatccgactattgttattcttttaaacatctgtacaccatccccttccaagaaagcgtttgcatagtttatcagaattattataatattcgtcccaccgttagtaaagtagcaatctctcactctctcatattatttttaatctaatttcaaatattcaacgtagttttaatttcacatcctattcaagattgtttacaatttacctataaaagcataacggagggatttcgatgacagactttcaaaaacaatttttcgcacgattacatatagaagaaaaagacacagtttcatttgaagatttatctaacattatgtacgcaatggcacaaactgtcccttttgaaaacttaaatattctcgaaaagaattttaaagaaatatcaaaagaaaatttgaaagagaaaattttagtaaataaccgtggcggtctttgttatgaactcaaccctactatgtattacttcctgaaagattctggattcgatgttcatctcgtttcaggaacagtttataacgctgcaaactccatatgggctgttgattctggccatatcgcaaccgttttaacacatcataatgaactttatttaattgaagtaggattcggatcatacttacctcttgcccctgtccctttctcaggtgaagtcattcactctattacaggagattatcgtattcgtaaagaaatgaccgaaaagggaaactacattttagagatgcggaaaaacaatgagttcttggatcaatcttctgctgatgattggacgttaggctatgcattttatatagaagaagtggatgaagaaaaagcaaatacagcacaaaaaattatcgttgaacatgaaggatcaccctttaataaagtacctcttattgtaaaactaactgaagatgggcatgcctctttaacgaaagatagccttacagtagcaaaaaatggtaaaaaaacgaaagaaaccgttacagacatgcaatatacaaaccttttacattcaaaattcgaaattacactataagtaagtaagccttgttatttcagcagggcttttcaattttcagcagggattttttgcaatttgttgtatttcatagttatatagaaatataactacatgtttagaaaggaaatgattatgacagaacttaaagatcgattacaagtagctgatatagaaaaatgggatttaacagacatttaccatacaattgaagattgggaaagtgattttcataaaattgaagtattaacgaaggaattacacgagtttaatggaaatattcacgatggcaatagtttattagcttatttaacgaagagtgaagaagtttctagcataatatctttaatgttcgcttatgcacgattacaatctgaccttgatacacgcgatactgacgcgcaatctcttgtcgataaagtatcacaattacacgtgaaagtaagtgcagcgaaatctttcttttcccccttcttacttagcatagacgaaaacacattacattcttacatagaagaaacagaaggcttacaatattataaagaagacttatttgaattataccgttataaaaaacacgtattaaataaggaccaagaagaaattttatcacaaatgggtgaagctctttcttctccacagcacacatttggtatgttaaataatgcagatatattatttggtgaagtgacgactgacgatggagaaaaagtgaacttaacacgcggaatgtatgcaaagttaatagaagatacgaatcgtgaaaagcgtaaagaagcttataaagcatattacaaaccatatgttcagttaaagaattccatcgcatctactttatccgctgctattaaaaataatgttactgtttcgaaattaagaaactatccatcagcgctagagaaatcattatttggcgatatggttccgaaagaagtatatgaaaacctaattgatacaacgaaaaaaaacattcaaacattacatacatacaatgaaattcgaaaagaaaaattaaacgtagatgaactaagacaatacgacttaggcgtcgatttagtagaaggtgcaaaacaagacatcccatatagtgaagcatttgacattatgattgcatcactagctcctttaggagaagaatatattgagacattaaaaagttttaaagataaaagatatatagacgtaagagaaacaccagggaaacgttctggtgcttataactttggtgtatacggcgttcatcctttcattcttttaaatcatcacgatgatttaaacagcctgttcactcttactcatgaatgcggtcacggtatgcatacgcactattcacatggataccaaccaagaatttctgcacattattctatctttgtcgcagaagtcgcttctacagtaaatgaagtgttattaattcactatttattaaaagaagcaaaagatacgaacgtgcgtaaccatttagttaaccattttattgagaaatttaaaggtactttctttacacaaattatgtttgcagaatttgaaaaaatcacacatgaaatggctgaacaaggtaaaccattacatgcacaagtcttcagtgaaatttatgaaaagctatttaaagaatataacggtgattcacttgtatttgatgaagaagtaaaatacggatgggctagaatccctcatttctatcgcccgttttacgtatacaaatatgcaactggattcgcatctgccattcaaatcgctgataaactattaagccgtgatccggatgctcagaaaaattatattgaattccttaaaggcggaagttcagactacccattaaacttattgaaaaaagctggcgtcgatttaacaacgccagaaccgattgaaagtgcattaaaacaattcactcaacttgttgaggagttttcaacattataaaaagcatgcagagtatatgctctgcatgctttttatttgaattactctattctatatgctgctgcgtcacacaatgaatcataccaccgtatgcatacaattcgttaacatatataccgacaattcttctccctggaaattgaccttcaatgatttgaagccctaatttatcatgttcatcaccgtatataggtaccaatacaacttcattaccaatgtaaaaatttaagtacgatcctttacaatctgcttcttttaccacttttcttgttactggtactggaatgagctgaaatggctttccatctatatttttcgcttgccgcaattcttgataatgcttttcgtacgcctccaaaaggtatggctctccttcatcgaaaggatcatattcatacagtatcgtattttcatttacaaaccgtgccgcgccatcaatatgataatccgtatcttcatcataattatcttctccgcgtataccagttatccatataaaatttgttactcctaaatatttcgttaactccatttcaatttctttctgacttagtgtgggatttctattttcatttataatagacgttttcgccgccattaaggtcccgtttccgtttatctcaattcccccaccctctagacagacactagattcaacttttggaatacgatacatttcacttattttattcggaatattagcgtctttttcgtacggatatttatttccccaaccattaaatatccagtgcgttaggcagcgattcccttccttatccgttacaaaaattggtccgttatctcgtatccaaatatcatcagtttcttgaattaagaaatcaattttatccatattcacgttagctacaattaacttcgattggacatgtattttctcttcttcatcacatacaacaatatggacattttctccatagtgaagctcctttgccatcgatatccaaatatcatctaacttagctctgtaaccttcacctctatgtgctttatcatgtggccattggagccatgtaccttcatgtttctcccattccgcaggcatataaaacaaactattttctatatttctcatacgtgttcaccccttatatgaatgtacgtacagtctatactttgacatcgtgttaaggtcaacaggaatatcttcatttacttgtagcaactttataaggtgattctttatttctcctttttattatgataaattgctttcatacatagaataaggattgacataatgttaatatcaatccttattctcattctattttcataactaaaaaacaaatttgtgtcacatactcttctgctaaacaatcacattcaggtccctttatataaacctcatatggcgaattaattatcacatacccatttctttcaatccattcttctaacgctatataagcgtaacctatatagtcgtaacttccataatgcatagtagtaacgatatgatgtggacttagttgtttcatttcatactcttgcgctacgtcatcatcattcccctgcataaccggaattcttaactcaatatcactgttactcggaatatattcttcatcataaaagactgcagatggagaaccgactatttgaaagttatttttttgtacctcttcatataagtcataaaaataatcatccatatcatctatatctatttttactctttgagtaattaacgttacttcgttactcattcccattaatatatcgtaacttctatggcgtgcaatatttagactactattcaccattaccatttcattcatttctgaaataacctgtaaattttgcttcacttcctgagacaactcgataatttgtgattgtatatgttgaacaaacgaatcttgatccgatgactgcaaaacaattttaatttttggaagaggaaatttatactcccttagcttttttattttcaatgctacttccagctgctcttgttcataatacctatacccattaaccggattcacatatgccggttttaatatctcctctttgtcataatgtcttaacatccgcgtactcattttacaaatccgagaaaactcagcgatggtatacatatcaatactccttgaatatattttcttttcattacttatttattaaaaccaatcaaaaatcttcttcattgaaaaattttcattctgatttttcaatcttctcattttcgaaggtaacaaatgacttggacaataccacgttaaacaattcatcgcgcctcccattgttgatatttctcctacatgaatttgaataacttgtttctccgtatactgttgaatatatcgtaaaacttcctcatctttagctagtccaaacttaggaacataaagagcatcacatgattctaacatatttatatacaacccttttgccgatgctatctcttgatcatattgtcctttctctgtatatgatgaaggaacaactataaattcagcttttggcatttgttctttaataatctcttgaacactatatctaaattcatgatcccctaaaaaatcactaataaacattgtatgttcatcaataaatttaaccattccgtctgcgtgtgctagtacatccccttcctcagcaggaataataataactcggctcacatctaaatcccattctaactgctcaataatttcctcttctgtccaatcatcgttatcatcaaatatgcgttctgttaatattacagtatcttttttattccaaataagattaccaccatctaatattaatggggattttacatattcaaagtcattctttttcaaccatttattaaattgttgatctaaatatcgcccttgatcatttggcaaataatttggtcgatatttaaatttaactagatgatttgtgacaaccggtgcaacatctcttagccaaatatcatcatactcaaaacagctcgtatgaaagtcttgttcttcaacagataaagatataagttgatccgcaattgatttcttttcatttaaacattcattaaagtaaatcaagtcttcataaaatggttgataatattcatttgattcgtctgttattgcagtaaaaataatgccattatgtttttgttccatattatttacctcgctttttaatagtagttacataactgattttacaaagtcaactattcctaattttatgtcttttgtcgttataactcatgcaacatgtacattttatgaatggattatagcatggagaaatattatatatttatataaaaaatataaggctgacgttaagccttaaattgactcttgacaagttttttaaataccatattttaaaacaacaataaatgattaaatgataactcgattcattaccatccaatttcagttcttgtataaactgaatgacttctttcataagaaacacacttagaacaacccctaagcaaattaaagctacatttaaaatgtactgtaaaacgatagggaaatacgaaaaaactattttaaaattctttaacacaaacatttttctcctttaccatataaaacgaaaagcgaatatacactataatttatttatcattacattaaaattttatcattataaataataaggaacgacaaaataggtaataagattccacctattttgtctatatagcagaacaacgaaattacaatcaattacttcaatgcaatgggttgttgttgtgtcacacaatgaatcataccgccgtttttatacaactctctcacatcaataccgactactttatgacctgggtataacttctgaatcgtatcgtttgcgattttatcattcggatcattataattaggcactaatacaactgtatttccgatataataattgatatatgaccctttataatcgagagtttttccattttctaaagcaaccttttctttactaagcggcaagtattcatacttatatttctgtcctgaagcattttttgcatctaacaatgtatccatatctttattagataaaccccattcggctaggtcatcttctttcatcgttacaatggtagatttattatggaatttagcaaatccatcaatatgaaagtccgtaatatctaaattaggtactccgtctaaccaaataaagtttgataccccaaggtcacttatatatttttcaatttccttttctgataaatcaggatttctatttttattcgtcaccgcacttcgagttaataaagcagtcccattgctgtctaattcaattgcgccgccttcaaggacaaattttccccaatcaactctttcaattcctgattgtttactaacatttttacgtatttgagcatcatttttatacggtgttttcttcccccaaccattaaatgctggatctaatattttgagatttttattgctgtcataaataaaaattggtccactgtcccttgcccatacatcatcagtaggcgcgataaagaaatcaatcttctccatatttaacccttcatctgttaaaaggttattgattctttctttttcttcctggtcatatgcaacaatgtggactttctcaccctcagttaaagcacttgccatcttaacccaaataggttcaacttccttcttatactcttcaccatatgtgtattcatgtggccattgcagccatgtaccttcatgtttatctttttcatctggcatcgtatatttcccagcatttttctgtacctctacttttttcccttctttccctttaacattttcattgttcccctcaaaagagcatccactaataatcgttgtagataatgtagctattaaacaaaactttattgcttttttcattttttcaacctcctgttcttgtctccaataatgtaaagcttcacatagtgtgaagctcaagcttttttatcaatgtaaaaattaccaattgttctttgcattacttaacatttaactacctatttagatttattcaaatgccaatcgcctttcttacctatttatcccgctatttatgggcagtaagacccccacctcaaaattcagcggaagcaaataatttaagtggggccctgttgcccgtaaaagcccgattgatgagggcttctactcagtggtggatgaacaaagcctctccactgattaaagtttcactttattcagtaagtaaaactttacaaaataaaaaaatcggtattgataattccatatcaataccgattttttataattattttccttctattaaatcattcgccattttcctaaattcttgattaaatgcatcattcataccattttggacgttagaaaataatatgacaaacgttcgtttatcccagttaaaattattaaaagtgttccagccagctaatacaccgtggttatgataataatctgggtaaatatagaaactaaatccatattttcttgcaggtgatgcagaaaacatatctgatacactttgtttagaaagtagtttaccatccataatagcttcatctaactttttcatatcttcaacagtcgtatacatttcaccacaaccatacagccagttcatttttaagcgaggtgtggctattaacttattatcttttttcgtatacccttctgctaagaaaatatcttctgggagtgttgcgcccattccagattcatgcatttcaacaggattcaaaatattttctttcacatattcagcaagtggtttatttgatattttttctacaatatatgcaagcaccatataattataatctgtatatttccatcctgtccctgctggaaattgtaacgtttgtgccccaatccacgttactaattttaaccgtgatgctgcgtcaacactaccttgtccctgttctggtaatccagacgtatgtgttaacaagtttcgtaacgtaatgtttttatctgctggaaacgatgggatatatttatttacattgtcttcaatgttcaacttccctttttcttttagttgcataatagatattgcaacaactgttttcgtaatagagccaatgcgatatttcgttcttggcgttgttagtacttgatctttcacattcgcataaccgtagccttttcgtaaaatgacatgacctttacttgctacaagaacactcccattaaatcctttatcttttaagtactgatctagttttccagctgcaatttcataacgctttttctcattcgcatcaatttcctgcttaacatctttttgcttactatttacattagaaaatgcctttgcatcatatttttttcctttatttgcatgtattagtgtaacaacacttccacaaaaaacagcaaaaataaagaaaatgattaaccatttctttaacatactaggagccctcttttatctagtttcacttaacgtacatccattctattttatatcttttaattatcaagtatattataatattatttaatattcactctgttaaaactagattcctttttctcactttcaattttgactactctctattgtatttctttcttgcaaaatttccaacatacaatcggatgcattacaatataatttcaaattcttttgtaacatttgttacatactaaaaagaatggagatgtatatgaaaaacaccgataaacgcaatcgtttagatgataagatgtttcattatcggataacaaaaaataacatgttattaattgaatattacggaaaacagattatggcattaaaaggaaatgatgctgaaaaatttttaaataaaataaatcatgcaaataacgataaagaaaaacagctaattatggctaaaattacaggtaatttcaaaagaggtaatgaacgaaattgaaaacgaatctcatttacattttgattatacaacaaataaaaaaagaaatgtcgctcattcaacatttctttagactttcttcataaaaaatttacattgctaacattccttcattttctatacttcctatataagctaaccgctgaaatagttagtaatacaactatacataaccacgcatacgtatatcccttcttatctacaatataaccaaataaagcaggcgcagcaataatggcaatttgatttaatgtaagtgcaaaactcactgtcatccctaccgattcttcacttgctgattccgcaacttcagttataaaaagactaaaccatccaattgaaaagaaccctaacaatgcacttacaccatacaatacattcgttattgtatgtatgctcattactaatattagaatgaagaaaatagaaatacaaacagttataaataagagggtacgccgatttcccttataaaacaaatcactagtagctgctaatataaccctaccaaccattccagaaaagaacataacggaaaatacttttccagctaaaattggcgtgattgattgttccaatactaaaaattttataaagtgtgcaactaacaccatttgcaatgaaatcatacaaatgccagttatataaattgcatacaattcttttttacacatcacttcttttaactgcatccaaaaagaaagtttactacgttcttgtttaactttctcttgaatatatggttccttataaaatataaaaaataaaaaccctccaattatacaaatacatgcaatgctatttaccgcataggccatattatattttattgtaagaaacgggatcaatactcccgctaatgtaccaccaatcggtataccggcttgtctaatccccatcgctaacccgcgattttcttttgagaaccacttcattatcaccttacttcctcctggctgcgaaacactataaaacgttcctactaataaaagtacaaagagtaacccattaaatccattgaccatattagtcagtaaaaacgaacttcctagtaaaaatgaacttatcgaaattaacaacttttcattgtattgatcaagtagccgcccgacaaaaagcatacaaaatagcggtcctatatttacaacacttactaacaatccaatctccgtattcgtaagtgcatattcttctttccaaaataaagcaaacgctccaacaccatacgttataagtgtcgctgttgtttgagcaaccgtcgcaaaaattaacataacccacttataagtactattcaccctttcttccattaacacaataatccctccatccccttccattgtatgaaagttctgatatcatataaaataaagatttatcatgtaatccatcaaaaaaaatgatgccttttctggagggatgatacttggatataaaagatttaactgtattttacgaagttgcgaaagaaaaaaacatatctcatgcagctaaaaatttaaactatgtacagtctggcgtaacaatgcgtatgaaacaactagaaaacgaattaggtgtgcctttattttatcgaaacggaaaaggtgtaactttaacttccaacggtgagattttattaacatacgccaaacaaattatccacttaatggatcaatctgttaaagcagttcaaagtaatgggatcgaaccaagaggcactttaaaaattggatgtacagaatctacaaccgctgtaagacttccatctatattaatggcctattatgagaaatacccaaaagtcgaattaattttagaatcaaatacgacggaacaattaattaggcttgtactagaacgaaaactggacggagcgtttatagctggctctactcagcatgccgaacttcatacaaatatatttcgtgaagaagaattagttctcattagcaaaaagcctttatcttcctttaaagacataggagacatgaatttacttgcatttagtcacgggtgctattatagaaatttattagaagattggcttcaagaagaaggaatttcacctaagcgagtatttgagtttggaacaattgaagcgatactcgcatgtgtaaaatcaggtatgggcatagcaattatgatgaagtctattttaaatggtcataaacatgacatattattcaatcctttaccaaatagcttccaaaaagttcctactacttttattactagaaaagatatatatcactctgctgcattacaaaaatttatggagatgactcacaatccgtgaaaagaaaatacgtggtatgaaacgaaaaacaaacactatgataaagcgaattgaggaacatacaaaaatgttcccttctactttctataacgatgaatactggaatatgcctttaccagtttctcaagcttttatcgattcttgtaaaacgcctagaaaagtaaaacgattatgtattcaaaccttattaaatcaagcaaatcatttaataaatataaaacctagggatacacatacatatcgagttgttgttttgatttctataaataatttatgggattcgcaaatcattatatttaaaaatgaggactactttcataatttctttaatagagatagtgaatttcaaaaatggattcttctttcaaatgaaattgatttttgggagacatgggaaatttcagtttgtcattccttcaaaacgcttcactttcaagaaattatttatgatgcagatgaatgctatgaaaaagagattacgtttatcggggagttaaattaaaaagggtatacctaaaacactggtataccctttttcacttatttttcctttaatacactatgtaatcgatccggataatttgtaaacattcctgtagcaccccatttgattaacagtctcatatcgggtttctcattaattgtataagggtgaattaacagtccatttttcctagccattttcatatatgactcatcaataattagttctccgttatcattacgtaagtttggtccaataccagctgcatactttttaatttcttgaaaatcatcatttgttacacttttcggttcatgtgtaataccagaccattcaacaatttcattgttttcatttggataataccaaagcaattgaactaacggaatattttcattcatactatgaatctttttcaaactatctttactaaatgattgaatcataacacggctagaagacatgttttggcctactaaattatatttttgtaacaacgccaacaaattctcttccattcctggatacacatctggtgattttgtttcaatataatacttcatacttcttccatacttttggaagatttcttcaagagttggaaccttttgcccaacatactcttgcttagccttttctggatacgctttattaaaccatgatccagcatctaaactctttatttcgcttaacgttttatctcgtacttcgcctgttccatttgtagtgcgatcaactgctgtatcatgcattgcaattaattggccatcctttgttaattgaatatctaactctaaataatccgctttcatttttttcactagatcataagaagcaaaagtatgctcaggtgcatgtccacttgctccgcgatgtgcaatatttaaaaacttattcgtattccattcatgctttccttctgctttcgcatgaacagctcccccagcaaagatgcttcctgtcataaagaaaataactaaaacgctaataatctttctcatccttcaaacccttcctacgttgcaaatttcaacaagctaatgagatttacacgaaatagaagacacactttcattatttttataaacctatattaaaattccaatcttacaaatgttttctatattattaatatagaaaactagtattatcctatttaatttctatagccctccttttcacatgtaactccctattttgtacggttcattcaataaaaaaagccataaattatttagaatacactcctgtatccctaaataaatttatggcttttctcaaatatctccggcctctattaacttgtcgaatttaatcatatcaaacctattgaaatttgtgaatatttttttcagtacagtgaagtacataaaacaatatttctgtagttacttaaaaatcacataataaatttctcattacctcttccaatactatatctggatttactaccgttttttccgaacgccatccgataaagccatctggtctaattaatacagcacctccattctctataccatataatttgctaaaaatatcttctggaacaataaagtctccacttaagccaacacgatacccttttagatgtattcctaatttagctgaaacagcatgtgctgcctcagcccaagaactattttctactcctgtaagtaatacaaaactgttaccgaataagtctaatgtagaaactttcttcccctcatacgttccccataaatgtggcgctcgcgttccaggtcttccgttcaactctatgctatccattctatgcggagtgactgaatcatctataatcgcctctgaacaatactgatatccaactgtaacagctaaaccatccatattattcaaactgccttcctctctattcgcagcacgaaacagtaaactacttgcataagctgtcgttaattttgcaacagagtgtctctcctcatgatatgtttctaacaattttggttttgccttcccttttataacagccgctaatttccaagctagattgtgcgcatcttgtattcctgtatttgaaccaaatcctcctgttggcggcataatatgtgcagaatcgccaactaaaaaggttcgatttccttgaaatttcaccgctgtactttcggctgcttcccacggtaaaacacttaatatttttgattcaacatttgtacttccaattgctatttgaataatttgtttacaacgttctatagtgaagtcctctagcccctctccttttaatggatcgtaggctacatgataaatccatttttttacgttatcaaccgggataagtgcaccaagaacctccggatgaagtaccatcgaaaaaccgaatgcatctccttgtataaactcacttaaatcagcttcaaaataaatattcatataatagccaccaatggttccacgaccctcagttttaatccctaactgctcacgtattttacttttcgctccatccgctgcaattacatagtcacaatgtatgacactttctttttctgtttcacgatttcgaatcgttgcttttaccccgttttcattttgttcaaatgaaactaattcatgataaaaagatagttgctcgcctaatattttcgcttcttgtaacatcatctcttctaaaataatttgataacacgcagtttgttttgatggactaatcttttctattttttgaagtaactcttcatcgtttccgtattgcgtcgctctcatttgttccaattcttctttattcgcctcagctattgtatgaaccgctattcttcctctgcagttctctaatgctttacctgccaatttaattctttgttccaagcctaattctcgaaataactccattgtacgtaaagtaagaccgcctgctttcggatgaatggcagtagacggatgcctttcaataagtaagtactcaatattatgttttgcaagaaataacgcagacgctaacccagataatccccctccaacaattaaaactggtacatcattcgatttcatatatttaccctccacatcattgttctgagctcagtgacataaatataatcaaaaaaaacattaaaatatagacttatatttcattttgaattatcatatagatagattacgccccaaaattccttttaccttttcatacatctataatccacctgaattgtgtctgtatgaaagtgtaaaacaaaagaatgtaatttacgttgaaccatgttctatcgtaaaaatcaaaaataatacaaacattataagcggccgtaaccttatggattatacaaggttacgaccgcttattttattgttacatcattttttgtttttaaaacttcatctattgtgttatgtaatccttccaatcccttttctatctccctataattttcaacaataaaaaattcattcgtctcgattttctttctcaatattgcacctcatgcaacaatcatgtagcattaccgtatcgaagtaatggttcatcatcttaaacctttcgactaattttttggaggtaaagtgattgaaatgaataaacaagaacaattaaatgttataaaaaaagattttattgattctcaaaaagtattattggcaattggcgatgaaacacgtcaagctattttgttagttctcatggaaacggaatgtcaaaccggattacgtgtaggagaaattacgaaacaaacacacctttctcggccagcggtatcacatcacctaaggattttacgagaagccggtattattttaatgcgaaaagaaggtacaaaaaacttttattatattgatatacgtacaaaattaggtgtattaaaaaatcttgtgttagatattgagaaactattgcacaacttttattaaaatttggaggtataagaaatgaaagcaatgataattgataagtacggaaaagttccaatgcgcatggcagaggtacctactcctgaaataaatcaacatgaagtgctcgcagaaattcatgcagctagtattaacccaattgactttaaaatacgtgatggaaaagtaaagatgttactgaaatatgaaatgcctctaatccttggtaatgacttttccggtgtcatcgtgaaggttggatcgcaagtaactcgttttaaagtcggcgatgcaatatatgcacgtccaagaaaaaataagatcggtactttcgcggaatatatagccattcatgaggatgatatagctttaaaaccaaaaaatttaagttttgaggaagcggcgtcgattccactcgttggcttaacatcctatcaagcactacatgatattatgcatttacaaaaaggacaaaaaatattaattcacgctgggtctggtggtgttggtactttcgcaattcagttagcaaaaataatgggcgctaccgttacaacaactgctagtgaagctggttctgatttagtaaagtctcttggcgcagatcaaattattaattacaaaacagaaaaatttgaagaaatactcaaaaattatgatgcagtatttgatacaatcggcggaacaacacttgaaaaatcattcaatattataaaaagcggaggaaacattgtttccgtttcaggtatgccgaatgctcgcttcggtaaagaatttggttcaggcttctttaaaactctcttattttcattagccagcaaaaaacttactgcacttgaaaaaaagcataatgctcaatattcatttttatttatgaagccaagcggggatcaattacgtactattgcaaactatattgaagccggaaaaatcaaaccggtaatcgatcgagttttcccttttgaagatgctcaaaaagcaatggaatattcagagtctggaagagcaaaaggaaaaataattgcaaaaattaaataataataaaaacctccattttcttaaaatggaggttttaaatttgctgttaaatagacatagtgcaatgaagtccttacaatagattgcaaggggaaatattatattatacttttagttaactttacaaagaatacatacgtacaaatacataacttaaaatacaaaaaggaggagatacaatgactaaaaataatgaaacaggttggaatttagataatagttatacgactttaccacaatcattttatacagaaatcccccctactcccgtaagttcaccggagttagttaaactaaaccattcattagcgatatctcttggcttgacccctgaagaactgaaaaaggaagctgaaattgctattttcgctggtaatgcactcccagaaggagctcatccattagctcaagcatatgctggccatcaattcggacattttaatatgttaggcgacggtcgtgctcttttaattggcgaacaaattactccttcaggtaagcgtttcgatattcaactgaaaggttctggccctactccctattcacgccgaggagatggtcgtgctgcactcggtccgatgctacgtgaatatattattagcgaagcaatgtatgcactcgatattccaactacccgcagtttagcagttgtcacaaccggtgaaccaacatatcgtgaaacaaagttacctggagcaattttaactagagtagctagtagccatatacgcgtcggtacatttcaatatgctgcagctcgtggttcaatagaggacctgaaatcactagctgactatacgataaaaaggcattacccagaaattgaatcccatgaaaaccgatatactgcattactacaagcaatcattaaaagacaagctagtcttatcgcaaaatggcaacttgttggatttattcacggtgtaatgaacactgacaatataacgatcagtggcgaaacaattgattacggtccttgtgcatttatggacaattacgaccaaggaaccgtatttagctctattgacacacaaggtcgttatgcatatggaaatcaaccatatatggccgcatgggatctcgcacgactagcagaatctttaataccgattctgcacgaagatgatgaagaagcactaaaaatcgctcaagacgaaatttcgaaatttagcgtacagtatgaaaacaattggttccttggaatgaaaaagaaattaggactatttagcaacgaagaacaagatcaatcacttattgagcaacttttaaaaatgatggagaaatataaagcagattacactaatacattccgttcattaactcttgatacgttagaaaatatccctctattcgatagtcctgaatttaaagaatggtacaaactgtggcaatctcgattagaaaaacaagaagaatcgaaagaaaacgcctacgagatgatgaaaaataataacccatcaatcatcccgaggaaccaccgtgtagaagaagcactagaagcagctgttacaaatgacgactatagcgtaatggagaaacttcttgaagctttatcaaatccttatgcgtattctacagatcaagaagaatactgcattccgcctgcaccgacgaatcgcccttatcgtactttttgtgggacttgattaaaaatttgtttttattttaacccaaaatttattaagttaactattaatcacaaacttaaaagttgctttcaatattgaaagcaacacatttagtatccacccttaaacaagtcacaaattataatttgtgacttgtttaattacccacgttcaatagaaggtttgttttgcaggcatcgttgtatcttcagagacagcatatggattttcattaggttttataattataaacgttccaccatatccactgtgagctaatttattgcaaagaccttctaccataaaaccccataactccagctgctattcccattatagataatccaagttttttctttattttaatgcttctttttcaaatattctcttttttatttcataactcataaaaaaatacttttctgctttttctatattacctactttatgaaactctaatgccagactttcagtatattcgtgaatatactccgataaattttttctttcaaagtaagaaaaaccttcaagaataattttttctattttttctacctctaaatgctgacaaaatccctttagaattaaaaagtgatatctatattcatcattttttaattcctcacaaaccttcaatccactttcaattaattccttcgctttttctatttcacctaatttataatattctcttgcctctaaaaagattgccttataatgagtaggcatttttttagaaacctcagataagtgtctaattgctaaaactgaaagattttgactcgcatacaataaacctaaattatgtctgattcttaatactaacatttctgcatcatttttttgtaaaatgtttattgctgacgcaatatattcctcacctttatcatgctgctttaattccgaaaaagataatcctaatatattttcgcacagcgctatgttcacttcataccctgcttgtttaacaaagatatctcttgcctttgaagcgtattcaatagctgaatatgcgtaatgcaagtggtattttaatatagcaactctataattaaactctgcatattcaatttcatctgaaatatgctctaataacccttcagctttttcaaaatagttgctagcttcactataattagtaagaattgtataatgaatggctttgaataaataataataataattagaatattcatcatttggtttaggcaatgcatctattttatcaaaagcttttttcaaattacctaaaccatctattagcactttatatcgaaattctaacagataatagtgaaatgaaacctttatatctgattcgataatataaagctttttatcgatctcttcttttaatttttttgcctcacttatacgttgagctctaatatctcgataccaatcattcagcatcttattaattaattcattgccagtgatttgtatattcatcaaatccactctccttcttttaattatcataaaaataacataattcgattatttatatctatctatctatatatatatttctcaacaattgaacgaaattcattcactgaattttgttcaatattttaatagacccgctgtaaatatgaatactttttcttataacctctgaatatgagtatccttaaaatccgtctcatatttcaatccatatccaaacattcgatccattccaatatgtgctgtccatattaagccaatcattataacggtatctatcttaaaatagacacctattagaacaattaatatggatatgatatatgtgtgacatacattatatattttcgcaccaacgtgattattaatcccatatgctaacattgatagatccggcgctaaaaggaatacaaaaaatataatccaactaaactcatatatcgaatacatataaatcgtggctaaaaatacaaccattccttcaaaatgtacaatacgtttttgcattatttatcattcctatttttctatatttattgatacattttcatcgctgaaagtattctttgtattttttgaccagatggttgctaatattggccctgcaatgttatgccatactgccgctaatacacttgggagtgcagcaaccggtccaaaatgtgctgtcgccagcgcaacacctaaacctgaattttgcattcctacttctattgaaatagcccttcttgtcccttcgtctagtccaagtacgaacgcagttatatatccgagcaaaaaaccgaaagcattatggagcatcaccgcaataaagataagaagtcctgaagaagtaatgctacttacatttgctgaaacaactgcagaaacaattatgataattgctacaactgatattaaaggaataacagtcattcctttattaacgatatgagggaaaaactttttcactactagtcctaaaataataggcacaataatgacttgtacgatagaaagaaacatggacatagcatttactggcatccattgccctgcaagtaatagtagaatgagcggtgtagcaattggtgctagtaacgttgatactgaagtcattgcaatagacaacgctaagttcccttttgctaaataaaccataacatttgatgcagtgccacccggtactgaaccgagcaacactaacccagctgctaattccgctggcagattcataacgtaggctagtacgtatgcgacaagtggcataataataaactgagcacatacaccgataataactggtaatggttttgtagctatgattttgaaatcaacagccttcaatgttaatcccatcccaaacatgacaaccccaagtaaaatcgttatgtaactagttaatccgagaaatggcgcgggaatgaaatatgcaatagctgcaatacaaataacccaaaatgcaaaatactttccagctatattacttatcgcttctagtactttcatccactcagcccctattttttaattgaaacacctttttcggattcaaaatattttgcggatcaagaactttctttattttctccattacaaataatgccgccccatgttcttcttcttgatactttcgtttcccgattccaacgccatgttctcctgtacacgttcctcctcgtttaagagcatactgaacgatactttcatttatttcgtctgccttcttcacttcctccttatcatttgtgtcaatcattaagagtacatggaaattcccatccccaacatgaccgagaataccgccaataagccctactttatgtaatacctctttcgcatgttgaatcgctccagctaattccgaaattggtacacatacgtctgtactcattagctttttaccaggataactatgcacgtaagagtacgctaagttatgtcttgcatcccacagcttatttctcgctgctgtttccgtctcaaacgcaatttctatacatttatgatcaagaacgatttctttcgtaaattcaatatcttgctttaaccctgcttcattgccgtgaaactctaaaaacagtgtcggttcttctctgtaacttgtttcattgtaataatttacttgtttcatagataattcatcaacgagttcaattctcgcgattggaatacctgcttgtaatatgttaattacagcttctactgcatcatttatagttggaaacgatgccctcgcagccataacatgttctggtataccgtatacttttaaagttaactccgtgaaacatccaagtgttccttctgagcctacgaaaataccatttaaatgataacctgatgatgacttcgccgctaaattcccggtatgtattactcctccatcagcaagaacgacttctaaatctcgaacttgatcacgcattaccccatactttaccgctgtcgttccgctcgcatttgtagcagccattcctcctaacgttgcatcagctcctgggtctacactaaaaaataatccatactttttcaattctttattaagctgagagcgcgtcacccctggctgtactctcacaagaaaatccttttctcttatttcaagtattttgttcataagagaaaagtccattgtaattcctttttcgtaaggaattacatgtccctctaaactggaccctactccaaatggaacgacagctgttccgtgctgaatcgctattttcattatcgcgctaacttcttcggtcgtttttggaaaaacaactacatcaggtaaactactactatggtaagattcatctttactatgtaactctcgtactgtcatatttattactactcgatcttcaggaagtatgccttttaattcatttactacatgttcaattgttatttccataatcaactctcctttttaattttaaaacaagtataccatctttatacaaaataattagaaaaataagattattaaacctgaacatacaaaaaagaacctgcagcacacgctacaagttctttttcactacattttaaacgatttctttattaacaacataaaccaaattaaagtaactgccatcaacgaatgagaaaatcctacaatataagttaaccctttaaagtcagctccatttaactgaagaagccctctcgctgctagcgaacctaacattaatgttaatgcaatattatgtaaaacaaaccacttattaaacccttgcacttcatgaaacgcgaatacttttgctaatcctaaagcaattaaaaagaagaaaaagccaagtacaagtgtatgcgtatgcaaaagatttaacaaagtagaccctaaaatccctttatacttaccatactccctagcgaaaatccctgataataaaccgataatcaaatacgtaaacgatgcattatataatttcttcattatgtacctccttgagtagaatgtatagtgtgtcatatttagtaataatgatagttatatagtaaaaactcctaatcacctaggagtcattgtataagcatctcactctttacaatcaatcctaattataagatatctctctatacaaaacaaacgaactttatgtgaacaaacacccccattaaaatatgttgcacttttgttttacacaatccatactaattgttataactttttaaaggtggtgtaattattgatagttcttgaaactgaacgtcttaatcttcgctggtttgatataaaagacgctccttttattcttgagttagtaaacgatcctgcatggattcagtttatcggtgacaaaggagttagtaacttagaagatgcaaaaaattatattgtaaacggtcccatcgatatgtataacaaacttggattcggcctttacttagtagaacgaaaaaaagatctcactccacttggtatgtgtggccttattaaaagagattcattagaagacgttgatatcgggtttgcctttttagagacattccgttcaaaaggatatggctacgagtcagcttctgcgataatcgaatacggtgtacaaaagctcggcatgaaacgaattgtagcaattacttctgtagataacatcgcctcaggaaagcttttagaaaaagtaggattacgatttgagaaaatcatttcagattcaggagaagatttaaaattatttgggtataacgcatagtaaagaaggtcgccgtgaatggcgaccttctttactattttactaatcttgtcataatacttttagttccattatagttttgcagtaattcttatgattatcactattcctttcatatcacatttttggaaattcatagaagtgaaactttcacacccgagtaaattatattaatatattaaacaaaggaaatgagaataaatggaacaaccgctatttttattagttcttcaattcattgcattcatattaatcatttgtatcgtatatggaatgttatacaataccgtattaaatttaaatatgcctaaatggactgcacatatggtagctacggtattttcccttggtattgcctatcaagcttttataaattttatttgaaaaacttttgtagcaattacttctattgttgatgcagtaaagcttttagaaaaagcaggattgcaatttgagagggttatttcaagatcagaaaacgtaaccattttttataaagtctttccagcgcaaaatagtgaagaagttagttccgctaaaaatgtgtttgcataacaaggaatgaatttaattgatcctgcaaaaattttatttgaattctggttctattgtttggaatcgttctagggtaccatttgtgtggactttaaaaattttcatttgcgcaccaaaatgttgagttaagtaaaatgtatcactagttattaaatttccaatcttccaatcaggttgatatgtactttccatggaactttctaaatccccaatcattattaaattgatatataatgaagatgaattactcaacattttcgttaaagatagtctatcaacctctaactacctaatgaactccagtaaacacatcttcagtcattttaagaggtacaaaaggcaccctttcgggtgatttttgtataaaaattctatttttttatattcgataccaaccacgaacctttttagaataacgttttttgacacttgggggtagtgcaaattcttaagttgatgggcatgtgatgtgacccttattacagataatactgcagctcatgctattcaaacgaaagaaataaatgcaattattgtaggggcggatcgaattgtcgcaaatggagatacggcaaataaaatagggacaatgaatttagctattttagcaaagcactttaatatcccattttacgttgctgctccactgtcaacatttgatgttacgaaagaaactggagctgaaattattattgaagaaagagatgaaacagaagttacgaaaatctttggaaaacaagtagcaccaattggaacggatgtttataatccagcatttgacataacgccgaatgaattaattacaggaattattactgagaaaggtattatacgcggggactataaacgagaaattgcatcattatttgaaaaacaagctaatacatattttactgaagaacaagaataatggattttagggctaactctagccacgaaggcatgttgttaaacaattatatgataataaaaaaggtggggaatccactccttttatcacgacatgttttttattaacacaattagcgattaaaaccatgaaaataggtgtatcaagcaaagtgttgatacacctattttttatagcctctattactacttttattcaaaacatattttgaaatgtattgagccaataatataacaatacactatattttatttatgcacgtctcttttgaaatgcatttgttccattttcgattatcatttgtagtactgttttccatacactatgattaggatttggttcttttcctttgcccatcaatttaaattgatgttcataccaagtaagctctaacatagaagatatttttttatctagctttttcacacctgttcgaattggcttgatcgtaactgtgtaataattgccatgaataatctggtttggaaaatcagggtttaatgcaaatagctttccaacgccaaccatgtctacagctccactttcaattgcctcattcataccttcttcggaacggaaaccgcctgttacgaccagtaccgcttgtacgagtgttcgagccttttgagcataatctaaaaaatatgcttcacgtttttttgtactttcacgtactccctcaaacattttaggattttcataattcccaccagaaatttcaattaaatccatacccaaatcgtccattttttttagtactttcatcgattcttcctcggtgaaaccaccacgctgaaagtcagcagaatttagttttaacccgattgggaatttctcaccgacttgtttacgaatttcataataggtttcaattaaaaatttcatacgcccatttaaatctcctccccattcatcttggcgctgattatgatgaggggataaaaattgattgattaaataaccatgggctgcatggatttgaacaccagtaaaaccagcctttttggcaatacgagcggcattgccaaatcgtttgattaactgccaaatttcatctgatgttaattctcttggtttattgaagaaatctttaatatcaccagtaagtggaatggcgcttggagcaaccggatttttagataatgttttcggagattgtttaccgggatgattgatttgcatccaaagctgtgtcccattttgcgtcccagattttgcccatctttttaagatatctaaatcacgttcatcttcaataacgacatttcccggttcgccaagtgcctcacgatcaatcatgacatttccagtcatgagtaaaccagccccaccttgtgcccaacgaccatatagttttactagttcttctgttggattattgctttttgttgccattgtttcactcatcgcagctttataaaagcggtttttcacagtgaatgtagttgatctattcatcgtcgtatttaaaagagtctttttcattttttctatcctttctttatttatttgatggctcccaatgctcatcaatgtaatcatccatctgttgaagtaaatttttcaccatttttaaactattattttccgggtcaatgtaataaaaattcatcgtcgcaacacgtcttacattgacaacctttgcgtcttttagcacttttatgtgatgggaaacagcaggacgtgataaatgtgttttacgtgtgatttcgcctactctcattccatctccacagcccgcttcaattaaggtaacaatgatcgattgtcgtgtggagtctccaatcgctgttaagacagtttggcatgctttaaaatcatctgttaatttattcaatttttgtacattcttcatccactgcatctcccttcgtttaatcgattgaaccattcaaatcttatcataattatttcacgaataatcaatgggaaagaaaatggagaccattgaatttcattcccaatttttacagtaagtttccacaattatttttaaaattagctttgcttgaagtaataagttttatgaatctaatccaaaaacaagtgactctaaaaataggatatgcttcctctttttattgccacttgttttgattgcctatttaaaattcaatacagttaccttttcacgtgtcatagactcaaggctcttacgaataccttgtgcacccatacctgaaccttttacaccgatgaatgggaagtggtcagggccgcgctctgtacgtccgttaatttgaacagaaccagtttcgattttattagcaattgcaaatgctttgttaatgtcttttgtgaagacacttgcttgtaagccgaactctgatttgttagcaatttcaattgcttgctcatctgaagaaacgcggatgattggaaggattggaccgaatggctcttcccaagcaactttcatttcttcttttacgtggtcgattaatgttgggtaaattaagttacgctcacgtttgttaccgataacaatcgtagcacctttttctacagcgtcgtcaactaaaccttgaacgaagtcagcagacttgtcatcgattaatcgaacgattgtgctatctttctctggagatccaactgatagttccgctacttgcgcttttaataagtcaacaagctcgtctgctacgttttcgtgtacaagtacacgcttaatagctgtacaacgttgaccagagtaagagaatgcaccgcttacgatatggtttgcagcatcttgtaaatcagcatcttcacgaacgataccaggatctttaccgccaagttctaatacaagtggaatcattgcagctgttttcgctaaatgcttacctgtgtttgtaccacctgtgaacgataccatattgatgccttcgtgccctactaaatagtccccaattgcagaaccgcgtcctgtagctacgtttacaagaccttttggaaggccagctttatgaagtgcttcaaccattttaataccgctaattgcaccttgagttgctggtttgaaaataacagcattacccataattaatgctggtgcaagttttgcagcagataagtttaccgggtagttaaatggtgcgattgctaatacaacaccaagtggtgcgcgttggatgatcgcaagtttcgatttcgttccgccagggaagctatcgcccatcatgctttctccgtgcatatgtaaagcttcttcgattgtgtaacgaatgaagtcagctgtacgaacaacttctttcttcgcatctttatagcctttaccgacttctttcataatgatatcggcaatttcatcctgcatatttacgagctcatcagcccatttatataagtattttgcgcgatcttgtagggaagctttagcccatgatttttgagcttcttttgcagatgcaattgcttcatctacttctccgcaagtaattgcttgtacttgtccaattacttcgtgtaaatatggagatgaaatttcaattgtttctcctgaagagctttctctccattctccatttacataaaaattatatacattaaccaccataattcctccgcctctaagtttggctcttatcaaaaagcccaataatttatcctatgttattcaatttgttcaatttagtttataagtaattttataaagttaactttcattgattcatccacaaagatttctaaaactaatatatctattttcttttgctttttcatgtgcgcacatttcctttactcttttgtttaatcattcgaacgattgaatcataacatgttatttaaagaaaaaaacatcgggaaagaaagtggagaccattaaaataagttcatgggctaaacatatacaaattaaaagtatttgtgatacgatgcttagataacattactgcaataatcatttgttaaattattttgtagcagagggttatagtaaagacaagcaaggaatatatgtaattgcaactcaaaagattacattaaagcataagagttcaaaatatctctaaataggagagtaaagactctttgacagaaacattggtaaaattctatactaaataaacgtccaagggttcgaataattaaacagggagagatatcatgagcaaaaaaacaataggcatattaagagaatgcactcctattttttcaattctgcaggatctaaatcgtcaagatatattggtgttactttatgatgaaggagaaatgtctgtaaatcagatagtagaccgactttctttatctagaccagctatttcacaccacttgaagcatcttttaaacgcaaatctagttactgttcaaaaacgtgctactgaaaggtattatgccctttctcttgacaactccattgtattattaaaacaactaattgaatcattagaaaccgataatcaattaaagaaataattaaaaaatagtgtgcacaatgataaaagtagtattttacaatgctactttttctacaaagtgaattaaaaaatatttattgacaaagataaaagagtcaaataatattttacttgcaaagcgttcgagtgttcgaacattagaacgtaatgattttagaaatttattttaaacattttaaggaggaaacgaaatgaaatacagtgaacaaagtgcatggcgtgaaatacaagcttatttacctaaaaaatatcactttacagataattatcatccaacagaagaatggtggaattggaaaggacatgaggtacatttagactgttttcgaaataaaaacgcacccgttaaagttattttattacatggagtaggtacaaacggtagacagatgtccatgattttaggaggtcctctttcaaaagacggattcgaaacgattgctattgacatgcctacctatggagttacaaaagtaaaaaaaggttctgtagtaaagtatgatgactgggtggatttagcaagtgattatatcgactatgaacaacaacgtgatgatagacccattgtactgtatggtttaagtgcaggtgggatggaaacttaccacgttgctgcaaaaaacaagaaagttaaaggaatcattggtatgacattcttggatcaaaaaaatcaacaagttcgtgacgaaacagctaaaaatctctttatgagtcgtgttggaatacctatggcaggcgttgcaagtaacataggacttgaaaactttaagatgaaaatgagtacagcttctaaaatgagtgccttatgtaataatgagaaagtgatggaaatatttaatcgtgataaaacctctgctgcaaataaagcaagcatgagattcctagacagttatggtaattacaagccagcaatggaaccagaagattttgatgtatgtcctattcttttaacacaacctgaacaagatagatggacaccgttgcatttaagtactccattcctaaacaaaataaaaaaagtggatgtgaaaatagttatgttagaaaatggaggtcattatccagtggaacaacccgcgttagatcaaatgcatgatgctatcgtggaattcatctataaggtcacaaaatagcttgacttgcaaaacattgcaattgaacatatgttgataaaaaaactccttttagcattagggagtttttttatttttggtatacaatatccattacaaatgaattctttaattcactagattcaatgaatactcttatattttcaccggtgattttattaatatcacttatttaattggtcctccagtatacattattaacggtataaagcacttatcattttgaagcttttttagctctaattcgtgtctctttatgtaatacattaattatctttgtagtacattattttttatgtgggaacaacgacaaattattgtttcaattcaatttttatccctcgtatgtctcaaataacttttccaaatactctagatttccttctgctatatattgctcagcttctatcaaacgcgttgctaattcagtctttgttaaacgcatatattgtttgtacacattctttaaatttctgtccgtctttaattgctcgaactcatgaaaagtatttttttcattttcgcgatagggaagatgcttttctagctctttttgttttttcttatagctcttactcttttctttataatacgcatagagttcttcatgatttctaatagtattaaaatgaatccctttgccttgttcatcgagttcttttgtctttttagatacattgtgtaaggtaacttctttgccctccgcaaggagggtatctattgcttttttacctagttcgaaggagttaacccttcttttttcgtaatcacgctctagaccacttttatggttttctatggataagtcttggctcattttccttatctctcctatactcctcgattaatgctatttctttcaattcagctttcgcatcatgtatcgtttttttcattttcaaaacttccagtttgaaacctttttcctcgtgatacttcttcgatttttctgcccaatctagatattcaagtaattcatctttttgttctggctcaggtattttagtgctgcatcctacacatgcaagttttgttggacaaatcttgttagtaacacatgtacccccaacggttttactaaatgggccgctgatctctctttgacgctcaaaaagggcttgtatctcttctggttgtcttaaaacttctttcatcatgtcagttgtagcggccatggaagtatgaaactcggaaataacatcggctacttgtttttgggtaggttgagagtaatatcttgtaacgtctaaatccttttgattaagaatcattgctacgacgtcaattggaaggtcttctgcttgtacagcgtgtgtcgcaaaaccgtggcgtaataagtgtggtttcaattttaccaacttcttgtcttgtgtttcatagatcaatccaaaacagatgaaatttaaaacacatgcaaaagtcacctctccaaaatgtttaccatggaactgaaataaatagagttggtctggtcgcgattcccctgattgcttcgaataacggaaatccacccttggaattgagcctttataatgttgatttctaaggtgaaaagcaatttcctttattaaatcaaaagtatcttttgtcgtataaaaaactgctaactcatctcttcctttcggaatagctctaaatatataagatgtttttccttcatttatttcgggagcagtgatatttatctggtctaaacacccaataccaagatgaacttgcgccacttcacctaaccttgcacctgaagacgtaaatatatctagtgccgtcgcaccaaacaaagctgttatatacaaaatctcaacgttcattaaaatgccctcggcatattcctgggagttagttataaaagtcccttgtgctagaatacctttatgatcgggttggaaaggtttattaagttcttttgaattgggttccctatatccataggtttcaagtactttcaacctttcatttatttgttctttatttaaagatcggtaccaacttccgattaattgatgttctaaaatgggtataaaccaaaaaccttcagtttcttctgcgggtttaccagtttcatcatctaatattgcagcgtttaaaaactcgacgaagtattcgttgttttcatctaaaaaagtagctcttcgcccctttgcattattaatggtagcgtaagaataatttttactatgatgaagtacgaaagaaggtttatcccataatcgaaacaagaaaagctcctttgatctatcttcgcgttccttgttttcaatataagaaaattcaaaaggaagaggatatccgttatcttttacaaattctacaacctcaagatatttctgtcgcaaacgcctaacctggtttaaacgaaacccaccttcggcacgaatttttataaattccttggaaattgcgtccgtttcagacttccttttccttttcgaagcgtcctttgctgctttattaactttaaaatctctactatctaggtgtgtttgagggagtaaaaaaggggcgaacatttcttgttgctcccttgtcaacttggtcgaatgccacttatgcacgttttttacaacatttttataactagtaaagagttgaattctcttgttatctgaatgggagggaagaatctcccttcgtagataatcggacagatgtatatctacctcaaaatcattaagacttgccaatttggtttcttgaaagagttgcttaaggcagagatttatacttgcaatatttgtgtgaatagtcttaggctttaagttttgattggatattaccatcaatcctagcgctaagtggtttgtaaaagggtaaccacagcacttgtttttgaagtaacgcaaatgcacagggttaaccttattccaaaagtagccttgtttatcctgatatgtaaggacgttgtcatcaacttttccttttaaatcttgataccatagtttgctttttaattcatcaatcacattcccacacccttaggcttatttatagattaactattcaattcattaataaaatccattaattcatgttgtttttcagacatttgagcaattttatttcgaggttcaaccgaaggttgtttaaatctcttacgaggttttagctgatttaaatactcctcctgatcctttttcatcatttctaacaatttattgtgttgctctaccacataatccttctcatcaacatgatgttcatagacttttattgtgtctgctttttcgctccaattcatataaatccgtaatcgtccaattgcataatcctgttctactttatccttgtatttttcgcgaatcatcctaatactacgggtcacgaaccaatgacgtgttttatgaatattgatttttatttctgcttttttcatgatgtttatccaattttttaaaaaggcatcataagtgtagggattgccatactgattaagaaatattgggatttcatcagggatttcattcattttcaaaccacttttatcaactttctttctagcaccatggatataacgatcaagtagttttaacgtgtcagtatctactttcaaaaactttgttcttattccatcgcttcccttattaaatgtagaaaactcacccttatcatacctagcacgatagtctccaaatgtaagtttgataacttctgtcgctctagctccggtttgaaatagcatcgttgtaataatttcatctctaagcttccatttactatcctttccagccttataaatcataaaggggaggtgaggatcatcaataatctctggcttccactcgccatttatgattttaaaaaaagagttggttaatcttcgacctcttttagataaaggttcttctgtacctgcttctttaggcattctaggtttgccttccctaacaccctctatttgcatttcatactcgtctaaaatagcgtgtgcatcaataagtggattgggagaaaggtatattttcatacgtatcatgattttgtagaaagattttaaaacacttaacatcctaccgacagtattaggacttatatttgttaactttacattgtaatacgttttgctatcgcttgttgtaaccttgcaatgagctttatgcatcaaaaaatcctctatggctatccgtacaatgtggggttcatcatcccaatttacagctcttccttgataattactgtcagtatgcaaccaggtgaaaaaagtatagagtgtttttagataggattctgcactactttctgtaattccacccaatgcctccttataaaaaactgtaaggggaaagaatggtttaaggtgtttgtccagtacaattaatttaaatttcttagcttttaccccttcggggcattttacgtgatgatacaaacttcccatctttatataaccacctttattcctgttccagccaattgtagagaggaatcgtttctgtctgttgttcctttaatgccaaagattcatagtcacgctgtgtcaaatccactaatctctttttttctccatctgcaattggatctggcatccaattcttcgttttagctgctttgacaaacttgtagggttcatcaatcggtctactttgttgccttataatgagacaaatttcaagcacacgctccaatggtaaagagataagaattttatgtacttcttctggaggggaagtaagagttgtcacttgatatgccaatttgactaattcagatttgttgtaatccggagatagagatttctttttaccttgaacttttgctagggaagagccagttaacgttgctacatcgcttgcaggtatcttccaaccttcttttcgactattttgaaaggcttttggaaacattccatcttttatctttctttttatagtttcttcattcttatagcccattagggctgctacttctttaaccgtgaaacacttctccatataaatccccctttagtatcacttgatttgtcatgctgttaaacaggttatacgttctagtgtgtcccacaaaaaggaagtataaacaataatcggtagattttgcactgttaagtaaagaaattatataaagataaaaaaatacactccattcaattaattgtcagaaacatgacagataaataataaaaagactagctaagtggctagtcttttttctcgtattttgctactaaacttttcggtaattctttggtcatataaacagcaatttgagagaactgctctggtgtttcctcaaaatcgcttctaatccattcaccgattaaactcgttaacatccctgacaaaacggcaaatgcatatctttttggtatgtttggaataattactactttcttatcgatccaaattgattcaaattttcctccgattttacttagaaaggttggatcctctttatcactagttaacagacggataagctttttattatctaataagtaatttgccagcttgataaatgtagtaataaaagtggtcataaagaggttgaatgtaatgataaaaacataaaaaatagacgtatcaagcaaagtgttgatacgccttaaaactacattgttaaacaacatgcgtcgtcgtgtagtaataatgatatttatttaattatcttaggttcagtattacatattaatagcttgtttttttatgcctaaatgcagtgttttctcttacttatataatgaaaggaggggaagaggatggaagagtggatcaagatgataggtaatgtagggtttccgattgttgtaacattatatttactccaccgtattgaaagtaaactagagggggtaattgttgcaattgagaagctcccgcggcaattactaaagtacgaagatcctcgggaataaaaataaagtttgctcttcttgagcaaactttatttttattgagcggtataaccaccatctacaacaacagcttgtcccgttatacctttagctttttcactcgctaaaaacatcgcataatcagcgatttcttgtacttgtaataagcgcttttgtgggacgagtggataaataacatcttctaaaacattttcaagtggtacatttcgtgtagtagctaagtcttgtagttgattacgtacaagaggggtatcgacataaccagggcaaagggcattaacagtaataccatgcgtagcaccttctaaagcagcaacttttgttaatccaattacgccatgttttgcactattgtaggcagcttttccagcaaatccgacaaggccgttaatagaagcgacattaataatacgaccatatttttgttgtttcataatcggaaaggcatgcttaattgcgataaacggagcaatttgcataatttgaattagtagctcgaacttttcagttggaaagtcttcaatgggtgaaacgtgttgcattcctgcgttgttaattaatatatgtaatgaaccgaaatgatcaactgtttgagaaattgctgctgtaatttcctcttcagatgtaacgtcacattttaaaccgatagcttgaaaaccttcattttgtaattgttcagcagcttcttttgcacgttcttcaagtcgatcggtaatcacaacttttgcaccttcttttgcaaaagcctttcccatttcataaccaataccacttgcagcacctgttaaaaagacaactcgatttgtaaccatgatgaaaaacatcccttcataataaagttttcatagtgctctatttagagaagctataatgaaattcctgcaaacatttggaaaaaaatatcgttaggaggatttaaattatgtcgacaagtcaaatgctgaaagggattttagaaggatgcttacttgctattatttctgaaggcgaaatatacggttatgaaatgagtgaaaagctagcgaagtatggttttacaatggcgagtgagggaagtatttatccgttattaatacgaatgcaaaaagaaggactaataacaagcgtaatgaaggaatctccatctggtccaaagagaaaatattatacattaacagaaaaaggcgaggaagcacttggtgaatttatggatcgctgggaagcgatgcaaagtagtgtagagcgtctacttgaagggaaggggagaaaaaaataatgctatcaagtgaagcgcgaaagtttttgttagatatgagattatttttgacggcaaagagtgtaaaagaaagtgatattgaaaactttttagaagatgcagagttgcatttaatagaagctgagagtgaggggaagagtgtagaagatattttcggaagctcaccgaaagaatatgcagatgaacttgtaaaagtgatggaaagggatagacaggaaacgtggaagcaaattggttttacagtaatgaatatcgtatcgttttggattattgcttctatcttaatagtgaaccatggaatgttacagatttcacttattcagtgtatcggttatagtttttcatttattttagttgttataggtcctaattttctacttcgcaaaatgacttttgtaacaagtttttcaaaaacgtggttttctatgtggtttttagtaatgatagcgccaatgtttttaatgggagttattatggtactagatgtgatatatcctacaaaaatgtttatattcaatcaaatgcaaagttatttattggctggtggtatttttatcattacagtagcggtaaatatgtattttgatggatggtttaaaaatttatatttaattattccactttcgattatgttactatttaaaacatttacatcagaagatctcgtgccaatgttatttcaaattatatgtttatacggaagtttgtttattttaatcttccttgaaattatgatgaagacgaatagaagagaaatgattaaataagggaggagttataatgaagatttctaaagaaggtgaaaagtttttaatcgatacgaaagtatatttaataacaaaagggattaaagaagaagatgtggacgcttttctagaagatgcagagcttcatttaatagaaggtgaaaaaaagggaaagacagtaagtgacatatttggtgactcaccaaaagagtatgcggaagaattagcgaaagagatggagaaggataaaagcgggagcataaaaagtattttagggatgattattggtattggtggatattggttactgacaaatattttatttggaagccccgatcaacaatttacgttaacaaatgtacagttaattggttatcctatcgttttaatcattacgattattggaatgattgttgcatttagaatgtcttcttttaaaagtaaattagtagaatttggaatgatttatgtaatagtaatggttcctattttattattggtgttattgatgtttatgaataaatggtatgggacacctgtattgcaattgtcgacaatgcaaacatatatattagcagcaattatctttttattacttcttattggtgaagtatatgctcttggctggatgggtgtttttgtactaattgttcctcttatgattatgttcttatttaaagatttagaagaaagtaatgtattttggggaattgcaaaggtcttacttatgtatggaagtatatatggattaatgaaatggtctttaaaaattgaagaaagaaaaagtatgaactagaaattcaataaaaagcggctgctctggatataccaaaaattatttccaaagaaatattatatagggatttttagagggattacatttacatttagttgtctatttttatttctagcagccgggattttgtttgttgattggaacaagttgttttaaacagtaacatgagggttactgtttttttctttgtagtaaagagctttgtaaagagagcgctttttgttctgttgttaataaggaatgaatatgaacgttttctggacgagggactatcggatacataagatttgttggagaagggtggtgctccgagccggttggagaatgaggatctgcatgagtaagttttccatgaatacgtcttgtaaataaaatatgaccgatttcgtgagcgagcgtatatatatttttcgtaggggcagccgaatttgttaaaacgatatagccagtaagttgctgttgttttgctaaagaataagcgcaggcaattactgctgtttctttgaaataatcactgccaatataacaaatataaaggtcgcattcaggagcttcatttacacatgtttggaaaaaggatgccaacttttcttgactttgaatggaatttttataactgatttcacggtcaaaaaaacggaaaagttcatttaatacaattacttcttgaatttgaaatgtaatggggtgccaaattgattctgcaacagctaaatcttttgcgatgcggtcatcagaaatatcggcgccgggagtaatgcaaatacatatattgacgtatggatccataaggaacacctcaaatgaaaaaaagttcttcctataatatatgtgggaaaaagatgtcatgtatggataaacgccttctttattgaatatatagatgacaagtcgaaaaaatttcatagttctataacatggtgtggtcgtctttttgatatagtaaaggaaagggggagaatatatgtatacattaaaaatcgtttcagacagagaagcactttatcaatttgcgagttatgtaagagttgtacaaggggttgaagatgtatatgtagaggtgggagaacctttatatgaacatcctttaatgaagttttatgtacatattaagctgaaagaaacatatgagcagcataaagcgttacaggaaatagcaagattagtagaattgggtcgttttacatatgtccattatcgtaatgatgaaattgaggaagcttttgaagctgtaaaatatgaaagttttaagaaataaagatgaaaaaacggaggcgaaagcttcctttttttctttaaaattacatgaacaaaaagagagaaattttgttatgataagggaggttagggaaaggggaatttacatatggggtatattgaagagttacgaaaagtcgttggtacaagaccgcttattctcgtaggatcagcaatcattatattaaatgataaacaagaagtattgcttcaatatcgttcagatacatatgattggggtgtacctggcggggcgatggaactgggtgaaacgacagaagaaacggcacgtagagagttatttgaggaaacggggttaactgcaaaaataatgcaatttcttggtgttctatcaggaaaagaagtatatttccgttatccgaatggcgatgaaattttcaatgtcattcatctgtatcaggcacatcatgtgagcggggaattaaagctcgatcatgaagggttgaaacttcaatattttccagtagataagttgccaaaattgaatgaaacgacagagaaaattttgcaaaagtttttatatgcactgacagaatagaaggttaattccttctatttttattatattaaatattttgattttttagtatgtttatagtatgatagttatagatatacatcttatggaatttcacctaaaaacttactagggtacataagagaggggcaagtacaaaatgcataatgttgttattacagctgcagttcgttcgccaattggaacttttggaggagcgctaaaaaatgtaacgccagtagaattagctgttcctgtacttcaggaagctgtaaaacgaggcggggtagaaccacatgaagttgatgaagtaattttaggtcattgtattcaaagaactgatgaagcaaatacagcgagaacagctgcattagcggcaggatttcctgacacagttacgggatatacaatccaacgtcaatgttcttcaggtatgcaagcaattatgtcagctgcaatgcaaatccaattaggtgtaagtgatgttgttgttgcaggtggagtagaagcgatgagttcgagcccttatgcattgaaacagcaccgctggggacaacgtctacagcacggagaaattcgtgatacggtgtgggaagtgttagaagatccgattcaccatattatgatgggtgaaacagcggaaaatttagttgaacaatatgaaattacaagagaggaacaagatgaagttgctcttcgcagtcatacattggcactgaaggcaatcgagtctggacactttgacgatcaaattgttcctattacaataaaagaacgtagaaaagaagtagtattttcgaaggatgagcatccacgtgcagatattacagcggaaaaattagcaggattaaaaccagcattccgtaaagatgggtctgtaactgcaggtaatgcatctggcctgaatgacggaagtgcagttctagtattaatgagcgaagaaaaagcgaaagaaaaaggcttacaaccgttagctagaattgttggatattcagtagctggagtagacccgaaaattatgggtattggaccagcaccagcaattcgtaaaggtttagaaaaagtagattggtcattggaagatgcagatttacttgaaattaatgaagctttcgcggctcaatatttagctgtagagaaagagttaggcttagaccgtgaaaaagtgaacgtaaacggtagtggcgtaggacttgggcatccaattggttgtacaggggctcgtattacagtaagtttaattcacgaattaaaaagacgtgggttagaaaaaggaattgcctctttatgcgtcggtggcggtatcggggttgccttatttatagaagcactataaaaaagaagcagctattgctgcttctttttttacgactcaaatagatgatgaaataatcgatcacgattttcaaagagaagtttcgtcgtttggtaatgctcagtttcttctaatgtggattcgtgaatcccttcttgtgttaaagaatatatagtggattcagggtaggccattaaaataggagaatgcgtcgcaataacaaattgtgaaccttgttccactagctcatgcattcgaataagcatggaaagttgtctcattggtgataaagctgcctcaggctcatctaaaatgtataaaccttgtcctgaaaaacggttcataaataaggaaaagaatgattcgccgtgagattgttcgtgtagtgaaacgccgccgtaagattttatagcatctatttcatcaatataagaagcaacgttataaaatgattcagcgcgaagaaagaaaccgtcgtttggtgtattgaaacttttggaaattcgaaggtattcatgtaaagatgaatgtgaatcgttagtgctaaagcggaaattcttcgttccaccttctgcattaaagcctaacgcaattgcaattccttcaagtaatgttgatttacccgttccattttctccaataatgaatgttacatttggatgaaaaactagtgattgtaatgttcggatagcaggtaagcagtaaggatatgcggaaaaactagggatattttctttttttaatgtaacattttgtaaaaagggtacgtcaatcaatatataaacctcaattcataacggattttgattctaaaaaggcggcaaatacaagtgttaatgacacctgaattccttccttattttctgaatattttatgtggattatatcatttaaactatcatattccaatgtgaaaataaatattgcatgaagatccattctctcgttatgatatatggtattctattgaaaatgtgagaaggagttaaagtatgccgtttacatttgcacatccagcagcagttcttccttttgcgaaaaagcattctaaacatatttcagtaacggctcttatattaggtagtatggcgcctgactttgaatattttttacactttagaccgtatggtataattgggcatacgtggcttggattcttatatttcaatttaccacttgtcttcttgttagcatacatatatcattacattttaaaaaagcctttcataacacatttacctaaaccgtttgctggctactatacatatgcagtagacaagcggtgggggcttcatacatggaagcatctttttgtattttgctgttctgcattattcggtatgctcacgcatgttgtttgggatgcattcactcataagacaggctatttcgttatgaaaataccattattacaaagagaatggtacggtatctctgtttataaatatatgcaacatggaagtacatgtattggtgttctactattagtatacgttttatggaagtatagaaatgaaatgggtaaagatcttattttagcttcggaaaaaagaaagtattgggtttcagtaattgttgtagcaactattatatttatcgtgcacgcgttcctagatccctattttcatattttccaaattggaggtataatagtatctggactgacaagttcattttgtggacttgtcattgtttctatagtttacaaagccagggactaattttatattcatgaatgatagcgttaggagaaatgaaatgatgaaagcatggaaaagtatttttgttttatgtagttttcttcttatgttaagtggttgcttccatcaagaagaaaagaaagctgaaccgaagaagaaagaatctattcctgaaacaaaagaatatggtgggcgtgagctgaaaaaagtaggacaaaaagtgaaagaaacaggatggggtacttttaagttagagcagatgcattctgtgaatcaaacatttgaagtagcgccaatgaaaattcacgtacaagatgtgaaagtaatttctttatcacagatgagtgaaaaggcaaaaaaaacattgaaagtatacacggcactaacccctgaagaagtaaaacggagattaggggataaagtaagccaagaagatgcagaattatatgcatcgctaagtggaacagagattagtaatacaattcgttacgttgagattacatataaagtggagaataccggaaataaaaatatgcaatttttctctatgaatgatgttatgattaatggtaagcaacattttaaagtagccactcaaaactttttatatgacgaagatacgttagttggtacaaaaaatgtatcaagagaagactataagcctggtgaaacaagagatggtattattggtttaatacttgacgatggaaaagacaaggtaaaggatattcagtttacaactgatgatttacttgcaggagattcagaaacacaagatgttgtaaaagagccacaaacgtttaacatctcactaaaataatgtaaggcaaaacagtcagcattcaaatattatgctgactgtttttttatttcttttatgtatgaatctacattttgaaaaggcaccttaattttaaacgcatctttttgttcattaaattgcttttcattgtagggaccgaaacgtttattgtgctttacgtcaataatccaataatgttcactttttttatttgcaattgctgcgtcagggttattcggatctgatttttcctcggtttgttttgcaataatgtatttatcatcccaagcaatgtctgtaatttttgcagggatgtattgtgtggcatatacagcatcttgcgaggggaaaagttcaaatgcatttccagaagtacgtatgagttcgtattcatcgttaaccgtataagttaagtgacctgtgtttcctgtacaaccagttaataggaaggcgacgaataggattatccattttttcaatatgggaacctcctttataatgctattgtaacaaattgtacaagaaaagtaagagaaaggctagtttacaatgttttttagaagtggtacgatgagacgggtaaagaaggatatgaaggagtcgacataaaatgaagttaaagatgcatcgtccagcgcttgtaatgaatcgcataggtgcttccctaattgacatgtttttaatctcggttatgtatggtgtagtagtagctattatgaccggaaactatagtgctatgtttaagcgctttaatataagcttaggtgattttagatatgatttcgcagtagtttttatattaatggcgatatattttattgtgttaccctttatttggaacggtgttacacttggaaaaaaggtaacgagaataaaattaatttcattgaagagtgaaaagctaacgttgcaaacattaattataagattttttgtagtgttattaccgaacgtattgctattaggaattccattaatatgtaatatatatatgatgttgttccgcaaagataattgtggttttcaggatttaattacaaaaacgaaagtaataagtcttgtataatgaaaaaaagacctttttatatataaaagggtctttttgattttataagtatatggggaatgtttacagtaaggaaaagctaaaatgtgttaattctatttataatagattgaaaaataagaaaatgatataatgattaaaaataatatctttattccgccatattggggctgattaaaatttcactttatataataagggggagattaaaatgactggaggtagtgtaatcttttgggggattttaattttcatcggtttagttttcgattagcgtaataataagaaaaaagaaggataaaaagtaaacgtttacaagtaaaatagcaatttttcttgcttgcagattaatcttataaaggagtatactgaatgacggtaagacttatagaaggggtaatgaaaatgaagcttgcaggaaaagttgctatcgtaactggcggtggcatcggtattggacgtaatacagctcttttgttggctaaacaaggcgcaaaagttattgtgacggacattgatcaagagagtggacaagcaacagtggaggaaattatgaatctaggcggagaggcactttttgtatcctatgatatgggaaagcaaggagattggcaacgcgttattagcattactttgaatgcattcagtcgcattgatatgctttttcaaaatgcaggtttatataaaatagattctattttttctcgccaacaagagaacgattccaatgtactttgtattaatgacgtttggatagagataaaacaattaacgtcatcttttatgaaacagcaagaagaagtggtgcttagtgatttaccgattttcggtattattagcacaaaaggacaatcatttcatacagtagaagccctagtataataataaaaaccgccctcaatatatgtggacggtttttttgtatgtgtatagtaaagataaattttttagcgaatacgttgttcagtttggttatcaaagaaatgtgctttattcatatcaaatgctaatttaatttgatcaccaggtgaaaatgtatgtcttgcatctacacgtgctgcaaaatcttgatttccaagtttcatatataaaatggattcagcacctaataattcagcgacttcaatttttgttgtgaaggcagtagattgcgaagcttctaaaaatagtagttcatcatgaatgtcctctgggcgaatacctaaaacaatttccttatttacatagccttgttcacgtagcatcttcatttttccttcagatactttaatttttatagtattgtctataacgaaatcggtttcagtcaatttaccacggaagaaattcatagctggtgagccgataaatccacccacgaaaatgttttctggcgtttcgtatacttcttttggagttccaatttgttggatttttccatccttcataacgacaagacgcgaagccatagtcattgcttctgtttggtcatgtgttacataaattgttgttgttccaaggcgatgatgtagcttagaaatttctgagcgcattgcaacacggagtttagcatctaagtttgataatggttcatccattaagaaaacttttgcatctcgaacgattgctctacctaacgcaacacgttggcgctgtccacctgataatgctttcggttttctatctaaatattgttcaagtcctaaaatttttgctgcatctttcacacgacgatcgatttcatcttttggtatttttcgaagttttaatccaaatgccatattatcatatacactcatatgtggataaagagcgtagttttggaataccatagcgatatctcgatcttttggaggaacatcattcattagtttaccatcaattgaaaactcgccttttgaaatatcttcaagtccagctaccattcgtaatgttgtagattttccgcatccagaaggaccgacaaatacaataaattctttatcttgaatgtgtaaattaaaatcagttacagctgttacgttattatcatatattttataaatgttttctaatttaagttctgccatggtatttccccctagaaataattatgcaaacgttttctttgagttcattataaacgaatagattcaaaaaataaataaaaaaataaaacgttttcatttattggagatttattagtggttttcatatgttttcttagaaaaagaacaataaaaattgtaagcgctattttaaattgagatagaatctgttatcattcattaatgaaaacgtttgcgccttaaaaaagagaaaaatgaatgatgaatgaaatggggtagcataatggaaaaacaatggtggaaagaaagtgtagtatatcaaatttatcctcgtagctttatggatagtaatggtgatggtataggagatcttcaagggattatttcaaagctagattacttaaaagagttagggattgatgtgatttggttatcaccagtctatgaatctccaaatgatgataatggttatgatataagcgattattgtaaaattatgaacgagttcggaacaatggaagattgggatgagctattacatgaaatgcatgaacgtaatatgaaacttatgatggacttagttgttaatcatacttcggatgaacataattggtttattgaatcacgtaaatcaaaagataataaatatagagattactatatatggcgccctggaaaagaagggaaagaaccgaacaactggggagctgcttttagtggatctgcatggcagtatgatgaaatgacggatgaatattatttacatctgttttctaaaaaacagccagatttaaattgggataatgaaaaggtaagacaagatgtttatgaaatgatgaagttttggttagaaaaaggaattgatggcttccgtatggatgttattaattttatttctaaagaagagggattaccagctgttgaaacagaagaagaggggtatgtttcaggtcataagcattttatgaacggtccaaacattcataaatatttacatgaaatgaatgaggaagtattatcgcattatgatattatgacggttggtgaaatgcctggtgtaacgacagaagaagcgaaattgtatactggagaagaacgaaaagagttgcaaatggtattccaatttgaacatatggatttagattcaggagaaggtggaaagtgggatgtaaaaccatgctcacttcttactttaaaagagaatttaacaaagtggcaaaaagcattagagcataccggatggaatagcctttattggaataatcatgatcagcctcgcgttgtatctcgttttggtaatgatggaatgtatcgcattgaatcagcaaaaatgttagcgacagttcttcatatgatgaaaggaacgccatatatttatcaaggagaggaaattggaatgacgaacgttcgattccaatcaattgatgaatatcgagatattgaaacgttaaatatgtataaagaaaaagtgatagaccatggtgaagatatagaaaaagtaatggaatctatttatataaagggtcgtgataatgctagaactccgatgcagtggaatgatcagaatcacgctggatttacaaaaggtgaaccttggattactgtaaatcctaactataaagagattaatgtgaaacaagcaatccaagatgaaggttcaattttttattactataagaaattaattgaactacgcaaaaataatgaaatagttgtgtatggatcatatgatttaatattagataatgacccttctatttttgcttatgtaagaacatatggagatgaaaaactacttgtcattgcaaactttactgcggatgaaagtgtatttgaaatgcctaaggatattagttatagtgaatcagagttatttatacacaattacgatgtagaaatcggatcaatagataacattccattacgtccgtatgaagcgatagtgttcaaattgaaataagaaaaagccttatgccatttcgaacttggcataaggcttttttggattaccattttaatatggagaatccatatggaggaagtgtaacttgtaatacacttgcttccgctgaaaattcttcgtttgtataaatgttaattattttcttaccagtaacatgaagagggagtgaaactgtaacttcactattagtagggtttaaaacgaaaaagatagtttcatcctcatatgttttcgtataagaaatataattatgttcatcatttgcttcgatgaattgaaaagtaccatgtcctccaaatgctttatgttgtttacgtaataaaatcaatgtttgtatatgggtaaataatgcatgatcttgttctttagtatcccaaatcatacatttacggcaatcagggtccatgccgccatccataccaatttcatccccgtaataaatacaaggagagccgatgaaagaaagatggaatacatagagcaatttcaacttatttttatctccgttgcatgttgttaaaattcttggagtatcatggctgtctaataaatgaaatgctgcttcatttacattcatagagtaggaatgtagagattctgtaatttgcttcatgaattcacttgctttaatggaatcgttagcaaagtaagaaagtagagcatttgtaacaggatagctcatgacagcatcaaattgatcgccttgtagccacggaagggcatcgtgccaaatttctcccaaaatatatacttcaggatttagtgtctttatttcagttcggaattctctccaaaagttgtgatcgacttcattggcgacatcaaggcgccagccatctatattgaattctcgtacccaataacgtcctacttcaagtaagtattcttttacatctggatgagctgtatttaatttaggcatatacggtgtaaaggcgaaagtatcataatttggaagtggttcggttataatcggaaattcatgaatgtggaaccactctttatatgcggacttctcaccattctctagtacgtcttgaaatttctcgaaaaagtatccactatgattaaacacagcatcgagcattacttttataccgtgcttatgacattcttcaacgagctctttaaaagtttctttcgtcccaaattgtgggtcaatttccatatagtcaattgtgtcatatttatggtttgaatgagctttgaaaataggtgtgaaatatattccggaaatgccaagcttaacaaggtaatcaaggttttgaataacaccagaaaaatctccgccgaaaaaattagttggagttggattcgcacttccccaaggaagggtattttctggattcagcgtactatcgccattagcgaatcgctcagggaaaatctgataccaaatggtgtctttaatccaagatggtgctttgaatacatcatctgcatgaataaatggaaagcagaaaaagttaccaacatcatcatttggaatgctagaaaagaatcctcgctctgcataaataagagtgtctgtttcagattttaattcaaacccataacgtaagcgcttaaattttggttcgattgcaatggaccaataatcaaataatgcagtagaacccgtttttttcatgggtgtacttgctgatatccatttcccgtctttccattcgtaaggatccccgtaaataagatcggcgctttgaatatcatctctcttagtacgtactcggatgtgaattgtttgttcatcataagcgtatgcataattatctttcggcctatgataaatggcttctttaaacatatagaaaatcccccttcaatatctctatacatagtattcccttaagtgtaataataaagcctgtattgcaaacgattgcctttctcgtagctttaatattgcttataagagtagtattcattttatataaagtcaatgtataaagagtataatgacataatttttaaattaatatttgcaaaatgaataaaagaatgtataatgatagacaaatagcgcaaacgttttcatagattgagatattgtttgcgcttcaattaaactattaaatgcaaacgttttcagttactgaggtacatagacaatttagggaggtttttgggatgaagaaagcattatcattattaacggtttcagcattatctattggtatgttatctgcatgtggaccgaaagattcagggaaaaaagaggaaagtaaagcgaaaaaagactatgatcttcttgtttgggaagatgataaaaaaggtgttggtttagaaccagcagtgaaaagctttgaggaaaaatataaagtaaaagtaaaagttgttgaaatgcaaatgacagatcaagtgaagaagttacgccttgatgggccagcggggactggaccagatgttgtaacattgccacacgatcaaatcggaaatgcagtaacagaaggtttactttctgaagtgaaagcagatgatgctgtaaagagtaaatttactaattcatcaatagaagcacagacatataacggaaaattatatggtttaccaaaagcaattgagacaccagtctttatttacaataaaaaactaatgccaaaagcgccagaaacgatggacgagctgtttaacttctcaaaagaatttacgaaagatggcaagtacggatttttagcattaggagataacttctactttgctaatgcattcatggcaggtatgggcggttatgtatttggtgaaaaagatggaaaaccaaatgcaagtgatgttggattaaataatagtggagcagtacaaggtgctgaatatcttcaaaaatggtacaaggaaaaattattcccaaaaggtattatcggtgaatcaggtgggcctgctgctgatggactattcaatgaaggaaaagcagcttctatcatgaatggcccatgggcgttccaagcaatggaaaagaacgggattgattatggcgttgctccaatgccgaaattaccaaatggtcaaccaatgaaaacgtttgttggggttaaaggatggcatgtaacaagtttctctaaacaaaatgatttagctacaaaattcactgagtgggtaacaaatgaagaaaacgcaaaaattcgatttgagaaaacaaaagaaattcctccagtaaaatcagtaatggaagatccaattattaaagataacgaagctgcaaaagcagttgcaacgcaatctgaaaatggaattccaatgccaaacattccagaaatgcaagaagtttggaaaccagctggagatgcgcttcaattagttgttacagataaagaggcaccaaaagcggcgcttgatagtgcagtgaaacaaattaaaggtaatattgaggcaaatcataacaagaaaaaataaggtgaaattcgtgcctctaatatgagaggcacgaattctctcccttccatgtaggaagaaaaaagggggaaggaacatgcaaacatctatggaaccagcaaatgggttaaaccattcaaagcataggaaaatggcaaccatgttatcaatcattccaggcgtgggccaaatgtataataaacaatttgtaaaaggtcttatttttctagtattaacaggttcttttattgtagcctttgctgatttattaaatatgggattatggggtattgtaacgcttggtacagaagttccacgtgaccattctgtctttctattagtagaaggaatcttggcccttatcgttatcgcttttgggctaggcatatatgcatttaacttatatgatgcataccaaaatggaaagaaacgtgatagcggaacaccgttaaattctgtaaaagagcaatatcgtaatttgttagatcaaggttttccttatttaatggtttcaccaggttttctactacttatctttgttgtcgtatttccaatcatcttcgtaattttaattggatttacaaactatgatttatatcattctcctccagctaaattagtagattgggtgggctttaaaaactttattgatattttcactttaccgatgtggagagagacatttgtaagtgtattctcttggactatcatttggacattcgttgcaacaacattacaagttgcacttggtattttcttagcgattatcgtaaatcagcctggtattaaaggaaaggcgattattcgaacaatcttcattttaccgtgggcggttccagcattcgtatctattcttgttttctctggtatgtttaatgaaacattcggagcgattaacaatcaagtattagctttattcggaattgaaaagattgcttggatgacagatccattttgggcgaagattgctttaattatgattcaaacgtggcttgggttcccgtttatctttgcgatgacaacaggtatactgcaatcgattccgggagaattatatgaagcggctacagtagatggagcgacagcttggcaacagtttcgtaaaattacattgccacttgtgttatatgcaacagcaccaatattaattacgcaatatacgtttaactttaataactttagtatcatctatctatttaatggtggaggtcctgctgtagctggacaagacgcaggtggaacggatattttaatttcatggatttataagttaacgatgacttcagcgcagtacggaaaagcagcagctcttacaatgatattatcgttaattgttattacagttgcgttatggcaatttaagagaacaaaatcattccaagaagaggatatgatgtaaatgaatattaaaagacagaagatgttacgtctctcattaagttatttagttattttcgtaatgtgtgccatcattttctatccgttattatggattatgggctcatcgtttaatccaggtgatagtttatctggatcaagtattattccacaaaatgcaacgttagatcattatcgtaagttattagatctagagaatagtaattacttactatggtataaaaacacattaaaagtaagtgttttaacgatgattttctcagtgttagcaattagttttaccgcttatgcattttcgagatatcgttttgttggaagaaaaaatggtttattaacatttttaattctgcaaatgattccaaactttgcagcgttaattgctttatacgtattagctcaattaacaggattaattgatacacaccttgcattaattttaatttatgtaggcggggctattccgatgaatacatggcttatgaaagggtattttgatacgattccgaaagaactggatgaatcagctcgaatggatggagcaggacattttcgtattttttggcaaatcattatgccacttgcaaagccaatcgtagcggttgtagcgttatttactttcattggtccatttacagatttcattttagcgagtattattttgcgaacaccagaaaattatactttagcagttggattatatgaaatggttgcgaagaaattcggtaatgaatttacaacgtttgcagcgggttctgtgttaattgcgatcccaatttcaattttattcctatcactacaaaaatactttatttctggtttaacagctggaggtacaaaaggatgaaaaatgggacattacgtcccatttttcttttcatctccctataaataagtttatagggagatgaaaagagatttgacatcacatgtgaaaagaagtgaaataaatagtatattatagtataggaaaaaatagctatatcccttacaatacatgaagagggagaataggattagttttgcaagatataagaaatgaaagtttatgacttgcaatgagtgcgagataaaatatatgaaaaatggcagagaaatgagaggagggggatttttatgacagttacaattaaagatgtggcgaagcaagcgaatgttgcaccatcaacagtttctcgtgtaattgctgataatccaagtataagtgaaaagacaaagcgccgtgttaggaaagtgatgagtgaattagggtatcatcccaatttaaatgcgagaaatcttgcgaaccaaacgacgaaaacacttggtcttgttatgccaagttctgcaagtaaagcttttcaaaatccatttttcccagaagttataagagggattagttcatttgcacacgtagaaggttatgcgctttacatgtcgacaggtgaaacggaagaagaaatttttaatggtgtcgtaaagatggtacagggacgccaaattggtggcattattcttttatattcaagggagaatgatcggattattcaatatttacatgaacaaaatttcccgtttgttttaataggaaaaccatatgatcgaaaagatgaaattacatatgtagataatgacaattatacagctgcaagagaagtggcagaatatttaatttcattagggcataagcaaatcgcgttcattggtggtggatcagatttacttgtaacgagagatcgtttagccggtatgagtgatgccttgaaattagcagacattgtattaccaaaagaatatattttacattttgatttttcgagggaaagtggtcaacaagctgttgaggaattaatgggactgcagcaaccgccaacggcaattatggcaacggatgacttaattggacttggtgtgttaagtgctctttctaaaaaaggattcgttgtaccgaaagatgtttctattgtaagctttaataatgctttattatcagaaattgcgagccctccactttcgacagttgatgtgaatatttatcagctaggatatgaggcagcaaaagctttagttgataaagtagagaatgcagaatccactgcaaagtgtatcattattcctcataaattactaaaacgtcaaacttgtgatcattatgcataaaaaagctaagagtttaactcttagcttttttcattagaaaggcttctaatcggtcgcagccttcttttaaagtttcgatactatacgcataggacaagcgaaggtagccttcaccgtattcagagaatgctgttccaggaactacagctagtcccgcttctttgacaagatcaagtgcaaaatcaaatgatgaagatgtcaaatgaccaacatatgggaataagtaaaatgcacctgttggcttttcaactgttaatcccatttgagtgagtctattatatacgtaatcacggcgttttttatattggtggcgcatcatttttggtgcgtctttagctgctgttaatgcttcaattgcagcgtattgagcgattgaagtagcacacgttacattgtattgatgaacttttaatatgtgtcctgctaaataacttggtgcaaataaaagtccaacacgccagccagtcatagaatgtgatttagataaaccgttaatgacaattgttttttcacgcatttctgggaaatgagcgatagatgtatgcttttgttcatatacaagctcgctataaatttcatctgaaaggacgaaaatatttttatcttttaaaacatctacaatatcttttagctcttctgttgataaagttacaccggttgggttagaaggatacggtagtacgatacatcttgttttttctgtaatagcatttttaagcgcttcagctgttaaacgaaatccagtttcacgaacatctacaaaaataggcgttgcaccgcataatcgaataataggttcgtagcctggataaataggagcaggtaaaattacttctgttcctggctctaaaatcgttcggaatgcaacatcaattgcttcgctagcaccgattgtaacgatggtttcgttttcaggtgaataatgtaaatcgtagttatcttttacgaagttacaagctgccttacgtaattctagtaaaccagcgttatgtgtatagcttgtatagttttctgtaatagcccgtttagccgcttctttcacgagagaaggtgtagggaaatcgggttgtccaattgttaaagaaatcaaattatcatagttttgaatcatgttagagaactgacggattccagaaatttggatgtccttcactctagggttaatgaattgttccattgtatctccctttcttccgtttgaaaattaagttcattttatcatattttctatgattacgctttgtatatgttatttagaaagagagagaaaagagaaaaaaagccgctataagcgactttttaatatccgtattcccaatctatttcatcttcattccagagtacagaggataccttgccaaggtgaacgactgattcgtttacagcacatgtgcagttttcatctcccgctttatgctgtaactcttcatatactgatttttcaacattttctagaacaaccaaattttcttcttttaaaacaagcgtagtacccgccatatttatcttcctcctactaaagtaatgatcacttatttgtaaacatagatagtatggattatatgctgtattttgctataattgtccgtctaaaaaagtatttttatattttctttgtaatccgtattcattgtatactgcacgaaggaaatttggtacagggtttacaatcatttcgaaaatctgtaacaattattatgagttgttaacaaagaattaacaaatatgttaagaaaaatcaaaattttaaaacaaatacacctataaaatgatataatcatatcaaaatacatataggggatgagaggttatggagcttatccgtgatttattgattcaaattgccatcataattttgccactatttttatatgaagcgattcgtttaaatcgctatcaagaaatgcctccgaagccaaatcgttactttattatgtttttatctagcgttacgctcgttctctccatgacatactctatttgttttggcaatgtgtgtgggtataactttcaccccattccaattgtcagtggttttttatatggtgggattgttggtttaatcccagcggttatttttgttgcatatgaatggttactaaagggaatgagctttcttccagttttagaagtaatatttctattgatagttccgctatttttatcaaagaaatggtctcttttttcaagggataagaaattaattttagcatttatgatttcatcattttatgtgcttgtttctttagtattaggcatgattaatgttcttttggaaacaggatttacaccgtatatttcgcaaatatatagcggatttatatttgcctcgcttatcatggtcatgacaatggtatttcaggtgtatttaactgaatatttaaatgaaaatgcattgctacgtacagagatgcaaaaatcagaaaagcttaatattgtaagtgagttagcagcaagtgtggcacatgaagttcgaaatccactaactgttgttcgtggatttatccaattgctagaaagtacggaagatgtgaagaataaggattatatgcgtcttgtattagctgaattggatcgggcggaacaaattatttcagattacttaaatttagcaaggccgcaaattgagaaaaaagaacacatttgtttatcagcccaattaatagaaatgaccactcttatgtcgtcatttgcagcgatgcaaggtgtatatttacaagttgaaatttcagaaagtctttatacgattggtgataagacaaaattgaagcaagctattatgaatgttgttaaaaatggtattgaagcaattcaaggaaataaaggatatttaaaagtaacagctattcaaaaagatgaaacaatcataataagagttaaagatagtggtgttggtatgacgaaagaacagttagcaaggcttgggcaaccatattattctttaaaagaaaaagggacaggattaggacttatggtaacatttagtattttacaagcgcataatggtacattggaatataagagtgaaagtggaaaaggaactgaagcaattattatattaccagctgtacaaaataaggaataaaagttaccgatggaaggtaactttttattttatattgtttattcatttgttttttcttgtttttctcggctaaataaacttttaaatgattgaaagaagctttgctcttttgaggcagcaaccattctttttgtttcttgaatttctcgaataacttgcataagctgtgcatcacggttactgtctttgttataaatttgactaacaagtttattcattttttcttcctgtttggattctcgtttatacatatgattcattaataagtccatcttttctttttgcaatgcatctgtttgaacggcgtgatcgactaactcttgaagcattttttcttgagagccttcttttacataaacttgttgcatcaattcgtctagtttctcatcctttaaacgattttgtgtaattagagtagaattttgatgaataattgcctcatttaattgagctagcatttcaagttttaacatgaactcctcaaagttacgcccatcttctttttctttcgtttgtatctcttgcttatcttgtataactggtacaggtggggcctctttttcttttaaaataatcggtatcgtttctgaaatatcttcttgtaatgtagcagctctttcgtgtatagatttcaataattttaaatcatcaagtttataaatacgagcatcagctgttttggaaatcatataaccatgttcctctaacagttgactatatttgcgaactatatgttttgggatgcctgttttattcgtgacatctttcgttttataggtagcttccatcatatttcctccccaaaaagtatcgtatatatcatttcaatcttttatgaggacttcctttgaaaaagaatgtcggaaggctattagttttctacagcattagtgaaaaaatgaaaatttttggcggaatggcaaggaataactaaaataatgtctgaaaacatatacaggagaagtttgttataataacggaggaaaagaaactggtagaaacatggaggtatacatgaagcaattaaaaggtattatcatttcaattatcgcaattctgtctattttagtagcagtttatgaagtacttgtgccagaggaaacaagtgtaaagaaaacgaatacgtatgatcaagtgttagaatttccgaaagaacgttatccagagacaggaaaacatattacggatgctataaaagaagggcattcagaagtttgtacaatcgatcgtggtggtgctgcagatagaaggaaattgtcgttagcaccatatccatcaaaaaaagggtatgatcgtgatgaatggccaatggcgatgtgcaaggaaggcggaaaaggagcacatattgaatatataagtccggcggataaccgtggagcaggctcttgggtagggaataagttagataaatacccagatggtacgcgagtaaaatttgaagtgaagtagtagttgtatatttcataatgaaggagaaggggaactatggagttaacgatttcttattcgcaattaatgttgatgaactatgacggtgagcagccttatgtagattggactgatgaagattttgaaagaggttatgctaaggcagatggaactgttatttttgaagcactttctgattatacttgtgaagtgaaagtgaccccagggaaacatattgaaaaagaagaagtagttagaacgattacggttccttttacagttgaaaatgaaagtatcgttataacgagtattctttctaataaatttcaaatacctattccaaatggtgagtatacagttgtattacaagcaattcctcttgaagagccaacggatgatgaattatataaaatacaatatgaattcttttttgaaagtaaagaataaaaaatgggttatcctgagaaaaggataacccatttttgttatgcgtttgtttttaaaagggaacgagcatctttcgctgcttgcaccatatgttctaaagctggaataacttcttctgttcttctcgtttttaaaccacaatcgggattaatccagaaatatttaggatcacatacttctaaagattgttctacgattttatacatttcatctttactcggtacacgtgggctatgaatatcatatacacctaggccaatgcctttttcatatgttgtatgttttaatgtatcaataaattctccgtgacttcttgatgtttcgatagaaattacatctgcatctaatgcgcgaatcgcgtcaacaatatcttcgaagttactgtaacacatatgagtatgaatttgtgtttcatttgctacagaagaagttgctaaaaggaaggattgtactgcccatgtaatataagcatcccaatctttttcttttagtggcattccttcacgaagtgcgggctcatcgacttggattactctaattccagaagattcaagtagttcaatttcgtgacgaagagctagtgcaatttgatacgaaacttcttttcttggaatatcatttcgaacgaaagaccaatttaaaattgtaacaggtccggttaacattccttttacaactttctctgttaagctttgtgcataaactgtttccttaatagtcatgccgttaataaaggctacatcaccataaataacaggtggttttacgcagcgggaaccgtatgattgtacccaaccgtttttagtgaatgagaaaccagcaaggcgctcaccaaaatattcgaccatgtcagttctttcaaattcaccatgtacaagtacatcaagcccaatttcttcttggtaacgaatccatttttctgtctctttttcaataaattgttcatattggtcatttgaaataacaccgttacgccattcttttcgcgtttgacgaacttcagttgtttgcgggaagctaccaatagtcgttgttggtaatagcggtaactctagagcaacttgttgtaattcgtatcgtttttcaaatggaagagaacgtgaaaaatcttcttcttttagtgctgttcgtgctgctttgacatcttctcggttacgtgcagcagatgaacgaattgtatgatgtacgtttcgatatgtttccagctcattactaatgctttctgtaccttgagtgagagcggaatgaataagaactaactcttctaatttttgatttgcaaatgctaacgcatcaaacagctcagtcgataagtgagtttcttctgttttatcgattggtgtatgcaataagctacaagaaggctgaacgatgatatctttcgtttggacttgtttttgtaacgttgtaaataactcaagaacttcatcaaggtcagctctccaaatgttacggccatctatacaaccgacagctaaagttttatcagctgggaatccatattttgaaatagcatttagattaccttctttaccatgaatgaaatctaatccaataccggataccgggaatgtaataatttcttcatagttttcttctacgctatcaaaatatgtttgtaaaagaagagtcgcatttggaacttctttacgaatagcttcataaatttcttttgcttgttgaacttcttttttagttaaagaagcgaaaatcggttcatcaacttgaatggcttgtgccccagctgcatgtagttctgaaagcagttgtacataaggtgcaactaactgttttaaaatgttaggaaattgttcttgtgtatagcctttagctaattttaagaaagtatatggtcctaaaataacaggctttccatctactcctaattcttgttttgcctcttcgtataagcgaagtgggcgattatcttttaaagagatttgtaatccctcttcatattcaggaacgatatagtgatagtttgtgttaaaccattttgtcatttcggaagctacgtgatctttagagccacgcgccattgcgaaatatacatcaaggtaagatgtaaactcagaaaaacgtgatggaataaatcctagcatataggcagtatccaaaacgtgatcataatatgtaaagtcgccaattggaatgagttcaatccctttttcttgctgtacttttacgtgttgaaggcgaatttctttcattgttgttaaaaattgttcttcatcgattttattggaccaaaaagcttccaatgtttttttccactctcgttgtagtccgatacgtggataacctaagttacttgtttgaattgccattttaaattcctccctaattgaaagtaagcatttccgtttactaggaaatacctataacaaaaagtacaaagacatagaaaataagccttcctttttgttttaacacctcatcatcatccgtgaatctatcagtgttgttaaaacaggcaggtctcctgacttatgcttcatataatttctttcaccttcccgttttcacagtggcaccaaaaagaaatctcagcatttacagtggcgggaccgtgttggagtttcaccaagcttcccttttaaacacgaaacgaaactttcgtgtacctattttccttttgaaaggaatttaacaagcgatatgatattgaaacaaattctaacacaatttttggaattttgtctactgttttgaaataagaaaattcaaaagtttttatttcttattattatgacttttcatcctggattaactaataatattacagtataaaaagagaaattgagctatgaaagaagtagggatgccttctttcatagctcaattttcatctatagcaacttctgaaagtcggcctgctatagcatctttaaggagggtgtttagccattgtaactcaactgtaatatgctcaattacactttgcaaaatatatagttgtgcacgtggaacctttcctttattacaatcatatatcgtttgcatagtatgtaaatattgaagagtatcgtttttctttttttctaaaataggaactaattcgtgatcattgctaaagtgagcgaaagataaggccgaataaataggtttatatatttggtttttggcttcgaattgttttaatagtaaagtgtggaatagttttttgccttcttctgttatatgaaaaatcgttttgtcaggtcgatttgtgtctctaattacatttgtaatatgaattgcgccttgcttttctaattgctcgaaggcgtaataaagtgatcctttagcatatttaatataacaatccatttgtcgttctttcataatatgctgcacttcatatggatgtttatctccttcgagtagcaagccgagaatgactaatttcatgctcatgctgtctcaactcctgtatataaaaactttatccagtaagatccccacccaaaaattcagcggaagcaaagaagttaggtggggattaactgcccgtaaaagcccgattggtgagggctaataatcagtgggggatgaacaccccccccactgattaaagtttcactttatacatattataaacggcatatcctttttcataaaggaatatgccgcttcttttttatattaactaacttgcttttgtttttctttctttttagggcctgtaaagaggcgttcatttcccataagtaaaatacaaataatacttagtacagccgggatgagtgcccagaagaatgtattcgcaatagatgtagcgagagcttctttaatacccgctaatatttcagcaggaatttttgcggtagcgcctggtgataataagaaacttgtgtctccgccttttggagctaattttgctagttcagggggaaatacagagtttagtttatctgtaaaaatatgattttgaattgtaccgaaaatcgttacaccaagagtcataccgagtgatcggaagaatgagtttgttgatgtcgccgaaccacggtcccgcatttccaacttgtgaatagaagacatacttaatactgagaatgagaaaccaacaccaagcccagcgagaatcataaatagtgttacgagtaaacgaggtgtgtccattgttaaagtacttaataaataaataccaagaacgaagaagaaaccagataccatcataatgttacgatagcttgttcgagacgctaattgtcctccggtttgacttccaattacagaaccaaccatcattggtgttaaaattaatccagcattagaggcggaacctccaagaacgccttgaatgaagattggaatataaactgtacagataataaaagcggcaccatagaaaaaggcaactccttgactagctgcgaataaaggttttttaaatagatggaacgaaataataggctcggttgcttttcgttctacaaagaagaaaataataagcgtaataactactgttgtaaataagccaataattacagtagaattccaggcatattctttaccaccaagttctaatgcgaacattaagcaaacgatacttatgacaagtgtaatagcaccagcccaatcaattttttgttttctaaattctagagactcactgtagtatttagtaatgaagaaaaaggagataagtcctaatggaatattaatatagaagacccaatgccaacttatatagtctgtaatataagcacctaataaaggaccgaatacactagatgtcccgaaaacagcaccgaatagtcctgtcatctttccgcgtttttctggtgggaagatatcgtacataattgtgaaggcgataggcataagggcaccaccaccgataccttgaatagctctataaatacttaattgctcaatacttgaagctgttccgcagagcgcagaaccgaataagaaaagaatgaggccacctatataaaaacgtttccgtccgtacatatcagaaagtttcccgaagataggcatccctgccattgttgctaccatataagctgatgtgacccaaacaaacttatcaaatcctcctaggtctccaacgattgttgccattgcggttgcaacgattgtattatccattgcggccattaatataccaagcagtaaaccagcaacaacaaattttgttttgttggcgtctttttttaatggttgagtttccaaatataaccctcctttagaaataagtaaactatattaagttttgagtgcagtggataaaaaattttaaatgtatagttgattttaattccttttccataagtgcactgatatgccataaagaatattatagtcaaatttgactataaggcaaactttttcttccgtcaaaatattctttcgtatgagtagagaacgagtgagccatactgaatattgctataaaggaaatgaagtaaattgtaaaaaaatttcataaagaacaccttctgttaatagatgaaaaatggttttttcttcatattgtcgaataggataaaaggaagagaaatattaaacattgcttgtagcaagctttagtgatttggggaattcattgtgtgtatgttacatctgaaatgaggtgaatatatattatgaaaatatggggacgaatttcggatacaggaaagtattcaataccgctacaaccagtattgtggattgacggatcgaaaaaggaaaacgaatttcctcaagtagccgttacattacaaattggtagtatgtatacagaacagttttcgtatgaattgacctacgatgtaaacgacatacttattatgcgaattgaagtggaaaataaaggggtagaaatgatttcgagagttgttgtaagtcatatgattcgagattactttgcttatattcctaattctttaaaagttgataaggggataagtgagtttttattccagcttgttagatggcgaattgatgatttgttaccgaatgagaaggtggaactacgttgtaaaataaaagctaataaagataaagctcttaaacaaacattctttcaggctacatatacatttcaagataaagagatatcatatggcccactgcaaacaaatgaagttgttgtgcgtcaatgataaaaaggaacctgtacaaaaggttccttttttagtgaaggttgtgttttttgagtattttcttttgctccattcctttttttcctacatagttatttttgtagccaaagtatagaataaataaaaatgaaacaacattaacaatagcgtcgatttgatcgtttgtaataaagtgtatcccgaaagaggtaaataataattttaatgataatagaaaaccagctagtaaacgcatagcatctgatagattctctttttgtagcatatagattactcctttctataaaagttatatattatatatatgaaatagagtagaaaaggtatacaagcttaagcagaaatgtacattgcatatgtacattttttattttgtagaaaaacattattgatatagaaacatatattggtataaaagggggaaaagtatgaaacataaagggaaaattagtggattattgcttggcaatactgtggcagttacagaatggattgcacttcaggatgtaattgcaaaactggattcacgatcattttataccgtctttattatttatatattgcaaatgatactaagttattattttggacattggtacgataaaagagcgaacgagcgtatgggtatggaagtaggaggaatggcaagcaatgattttgttgttgatttttttgggaaagtagctgctttatctgaaagagattctcgtaatattacagtgtacattctttctgtaaaagaatgggaaggattaaaagacacgttgcaagaaaaaaagttgggagtgttagtacaaaaattagagagtaccattgtaaaaacaattcggaagggcgatgttgttacaaagtgggatgaaaataagtacgttattgtagcaattgataatggccatgaaacatcaacaataacaaaacgattaatgaaaaatattgaaagtgaaatagaaggtgatttactcagtgtcactcttttatttggagcagctagctatccagtagaaggaaaaacgtttgaagaactgttgagaaagtcgcaaaatcaattgtaccagtatagaaatttgcaagaaaatgagtgaagctttgatttgaagatatatgataggaagatgttttatttgtaacatttttttgacttttattacaaaaaaacgccacgtttgtaataaaagtctttaaaaatatatgaaataagcatataattatgatggtagtgtcaatgcaatttgcacagtgtgttttattttaaaagtgtagaggaaagcaagctctacacttttcctttttaggaaatgaaaagaatatttgtaagttgttgcgagatatcgattgtactgtgtaaaatgaacaaagagattaattgatagaaagctggaaagggaatgatagacgtgagagcggagcgatcaccttttatcaggtgaactattatagtcttattaagactgaggtgaaattccgtggacattaaagtaatacatagtgtgaacaggccttaaaaaacacgaagtagtatacttaaagatggatatggaattgctaaataattcaaaaagaataatgtaatatcaagtaataatttgtacaaacaatattaatgatcttcgtaaaaaagatgcgagtgtatagaacaattacatattttataacttttttatattacacgatggtcgtttataagtaggaggaagagatgttgaaatatagtaaattagcaattgtaactgcattatcaatgattttattagccggttgtttcggtccgaaaccagaagaagaattatatgtagcgtttgaaaacgctgctaaacaagaaaaaacaatgtttgaagatgcaaaaaaacttgagactttagagaaagaaggacaagaattatataaccagattgttcaagaaggaaaagataataatcaaactgttaaagaaaaactgaatcaagcagtgaaaaatacaactgaacgagaaaaagtgcttgcaaaagaaaaagaagttttaaataaagcgcaagaagaagtgaagtcagctgataagtatgtgaagaaaattgaagataagaaattgaaagatcaagctgataaagtgaaaagcacgtatgagaaacgacacgattcatttaataaaatgtatgacagctatgacaaatctttaaaacaagaaaaagagttatatacaatgttacaagataaaggtactaaattaaaagatattagtgaaaaagtaaaagtagtaaatcaatcttataaggatattgagtcagaaaaagataaatttaatgaattcacaaagtcttataatacagaaaaagtagctttttataaacaagcaaatattaaaattaaagaagagaaaaaataaaacagtttggcctacacttggccaaactgttttatttttttgtataagtacgactataccatggaacaggttcacttaattttttttcttgttttaatgcttcaggaccaatataatcttgaattgttttttttgccactgttaaagataaggttgttttcggatttcgataggaggattcaagatgaccaagatgcggtagaattcgaaaatcttctttcgtaggagggatgtggaaaaaataatcgcctaaacgtataaggacatcagattgttgttggctaaaacgtgggtttctagaaaaatgtaatccttctttaattgcttttttttcagcaatcaaacgttctaaagctgtcttttttaaccagtataaatatttaggattagtagctgctttagcatgacgattcacaacgaaaatagattgagctagtcgattaatagaatgttggttttgtaattgagattgtggttgtgaaggtttcatattgaatctcctttcaatttttcattattataccataaataaaataggtatttattatacgcaaaaagtgattgtatatattttcaatattaaagcaatattgttacaaaaaacaactattttgtataatagtaatagaatatgttttttaaatttgataatgaaagagtgagaagtttgaaagaaatattaaaacaacagtatgccattatagatattggatctaatacaatgcgtttagttatttatgaaaagcaaaatggaggtttttataaagagattgaaaatacgaaagttgttgctaggttaaggaattacttaattgatggtgtgttgaatgaagagggaatagaagtattattacagacattatttcaatttcaagaaagtacaagattccatcagttgcatcatgtactttgtgttgcaacagcaacaattagacagtcggagaatcaagaggaaattaaaaagcttgttgaaggacaaacggactttactcttagagtattatcagagtatgaggaagcgcgttacggatacttggcggttatgaattctacatcgttttcagaaggaataacggtagatatcggcgggggaagtacagaagttacatactttagaaatagagagattttagagtaccatagttttccatttggggcactttctttaaagcaacaatttattaaaggggatattcctactaaagatgagttagagggaatgcaacagtatttagagtttcaatttcgaacgttaccatggttaatcaataagaaattacctcttattgcaattggtggtagtgctaggaacttagtgaaaatccatcaaaatttaatatgttatcctatagcaggattacatttatacaagatgaaagaagaagatattgaaagtgtaaaagatgaattggaaaaattgtcgttcatagaacttcagaaattggaaggattggcaaaagatcgagcagatacgattattccagcggttgaagtatttcatacacttgttaatgttatagaggcaccggcatttgtattaagtagaaaagggttaagagaaggtgttttctatgaagagttgacaaaagatttggggatttcatattatccgaacgtagttgaagaaagtctgcatttactatcacatgaatacgaaatggacatggaatttgttattcagcttattaaacatggaagactaatttgcaaacaacttgaggaaatagggcttatttctatgtcagtaaaagactgggaagtgttccatcaagcagcgaaagtatttaatataggcaaatatatagacgaagaagcaagccgtttacatacgttttatttattagcgaataagacaattgatggcatgatgcataaagatcgagtaaggctagcgcttattgcatcgtataaatcaaaaatgttatttaaacaacatttatctccatttgaaggttggtttgataaaagcgaacaaaaaaaaatacgcctgttaggagctgttttacaattttcagctactttaaatgtaaggcaacgatcgcttattgataccatatctataacagaaaacgaagaaggattaacatttaaagctttatgtgaaaaatcggcattagcggaaaaagtgcaggctgaaaaacaaaaaaaacagttagaaagagtattaaaaacgaatattaacttgttatttgaactaaaacattaggttgtacggatgtctttacaaaaaatttacactttataatattgtaatttgctaaaataaaagtaactaaattatagtaaaaaagtttcaaggggaagtgtgaagagaatggaattattgaaggggaatgcagtaaatttaaatgatacagcttattacaataatcgagagttaagttggttagcatttaatgaacgtgtcttacaagaagcgcaagatgcaaataatccacttttggaaagattgaaatttattagtatttttagttcgaatttagatgaattttttatggtacgtgtagcgggattaaaggatcaagtgagtgctggatttaatcagccagaaaataaagctggcttaacaccaaaaaagcaattaaataaaattgcgatgaaagcccatgcactaatgacagtacaatatgatacatttaaaaattatgtattaccagcgcttgagttagagggaattgaacgtttaacattcaatgatttgacgaaagagcagcgagaatttatagaagagtattttgatgagcaaatttttccggtgttaactcctgtagctatagatgcatatcgcccatttccaatgttattaaacaaaagtttgaatttggctactcttttatatgatgagaagcaagcggaagaggaaaacaggacgaagttaggaattgtgcaagttccttcattacttgagcgcttcataattttaccgagcgaagggcaaaagcataaatttattttattagaagacgtaattagtagctttactcataaattatttacgggatatacagtatcatctgttactcgtttccgtattacacgcaatgcagatttaacgattcatgaagaaggtgcgagagatttattaaaggtaattgaaaaagaattaaaaaagcgtaagtggggggctgctgttcgtttagaagttgggaaagaacacattgatgaaagagtactagcgttattatatgaggttctggaagtaaaagatgaagatgtatatataatggatggtccattagatttaacatgtttgttttctttatataaaaaactagctcctttatatgaacatcttgtatatccggctcttattccgcaaccacctcaagatttaggtgatgaagaagatgtatttgaaaaagcaattgagcatgatattttattacatcatccttttgaatcatttcagccggtagttgattttgtccgtgatgcggcggacgatccgaatgtacttgcgattaaacaaacgttatatcgtgtaagtggtgattcaccgattattcaggcgttaaagatagcggctgaaaagggaaaacaagtgacagtattagttgaattaaaggcaagatttgatgaagaaaacaatgttcattgggctaaagaattggaacaggcaggctgtcatgttatttacggtgtaagtcacttgaaaacacatagtaaaattacattagttgtaagaagaaaaaacggaaaaatcgaaaggttcgtacatctcggaactggaaactataatgatgcaacagcgaagttatatactgattttggatatattacatcaagaaaagactttggggttgatgcaaccaatttctttaattatttaagtggttatacaacaaagccacattttcatcatttatcggttgctccatttgatataagagagcaatttatagatttaatagatgaagaaatccgttatcataggcaatatggaaatggatatattatcgctaagatgaattcattaacagataaaccattaattaaaaaaatgtacgaagcatcacaagctggagtaaaggtagagcttattgttcgagggacatgttgtttaagacctggcattccaaatgtaagtgaaaatattcgtgtagttagtgttgttggaagatacttagagcatagccgtatttattatttccatcataatggggaggagaaaatatatttatcttcagctgatttgatgacgcgaaatatggagaagcgagtggaaatatctttcccgatattagatattgaaatgaaggcacgaattaaggcgattttacagcttacattagctgataatgtgaaaacacgtgaacaaaataaagatggtgattactattatgttattaatagtagtacagaagaaattgatagccaagtgaagttgtttaagatggcatatcaaaatacagacgctgaataatgaaaaaagtaaaaacctcttatgtcaataagaggtttttacttttttctactcatatgctccaaaaatggaagaatgagtagaaacaatagttttattataagcgtgtaatgagatggctcgttgagagaataatatttgaaagaatcgttattttaacttagtaatagtatggttgctgacatggtccaccgtaacaaggataaggtgctggcggcgggaaaggtggtggataaggtggataaaatggtcgagggccgaaagctaatgctccgccgagcaatccaccagcaattccagctagaaagggaacgccaaaaaacgggaagaagcgtgagtcgcctactggaccaataggtgctgaacggactggaattggttgataatatggatacatgaacatacctcctttattggactcacttttatcatatggtaaacaaaacgtggatgagcgcgtacaagaaaggatatgtaagaaaataggcgaattattacgaatgttggagtgtgaaaattgtgatttcaggttttgacataaagcgaaatgggacacgtgttcttcccaggcctcgattgacatagagagttaaatcctgaattgtatagaagccttcaatatagtctttggcgagtgaaggtgtaataatagctcctaaaaaaggaatttgtacttgtccgccgtgactatgaccagaaagttgcaagttgattggatatttagaaacttggggcgcgatatctggttcgtgaacaagaacaatgttataagtactttgccgtgcatgctctaatgttttctctatttttggtttgcctaatagtatatcatcgagaccgaaaatagaaatttcactattatccattagacgaattcttttttcactattgagcaatagctcaaatcctgattcacgcatgatgtgctcatagtattcagttccatatccaccgtgatcatggttaccataaatagcgaatttaccaaagggggcttgtatattttttaaaatggatgcaacgaaaggagtgtcagtatacgtttgataattatcaatgagatctccggtaaaaaggacaatatctggatttacagcattaattttagaaacaactttagataaatgttgaagcgagaaatagtatccgagatgtaaatcgctgaattgaagaattttcataccatgaaaactttttgggatgagttgtgattttaatgtgtgctgtgtaaaagaaatgaaatggggctctatatatttagcatagtagtatccgatgctactggttataaatgaatagagacaagtgcgcataccaatttttaaaaaatttcttcttgtaatgtgcttcataaaaatatgagtatacctcaatgttttcattccatttataggctactcaaatctcctttcagtttatttaaaatatactttacataataaaaagtagtatagattacgaaaaaaatgaataaaaagaaagttctttacgttaaaatatcagaaaagtttaaaaatataaagatttctattaaataaagtgataaaatgaatgtgtattcattttttggaggggatgtatgtgaaagaaaaggtagttattataacaggtggatcgagtggaatgggaaaaggaatggcgactcgttttgcaaaagaaggggcacgagttgttattacaggacgtacaaaggaaaaactagaggaaacaaagttggaaattgaacaatttccagggcaagtattacctgtacaaatggatgtaagaaatacggatgacattcagaaaatgattgaacagattgatgagaagtttggtagaattgatgttttaataaataatgcagctggaaactttatttgtccagcagaagatttatctgtgaatggctggaattcagtcattaatattgtattaaacggtacattttactgtagccatgctgtcggaaaatattggattgaaaaaggtataaaagggaatatcattaacatggtagcaacatatgcatgggatgctggtccaggagttattcattcggctgcagcgaaggcaggagtattagcgatgacgaagacgctcgctgttgagtggggacgtaaatatggaatacgagttaacgctatcgcgccaggaccaattgaacgtacgggcggtgctgataaattatggatttcagaagaaatggctaaacggacgatacaaagtgttccgcttggaaggctgggtacgccagaagaaatcgctggtctagcttattatttatgttcagatgaagctgcgtacataaatggaacttgcatgacaatggatggaggacaacatttacatcaatatccattttaaaagggataaaaaatgaatgtttgattcatttttttatggttaaatgtgacggaattgtgacatatgaaagaaaagtgtttacaagaggtcatatatacgttatatttaagacctcttttttcttcatagtagaattgctaattccccttagcattttacccctctaatcccttcaggaaaactgaagggattttttattatttttccgtaaatatcatgttataatttttgaaaagtaaagggagggaagcacgttgatagatgcattagatgtaatgagtaacttggataaagtccttccttattatcaagctatttttagtgctgatgagcatactgtaattggatacgaagtagtaggacgtattcaaacagaagagggcatacaaagtttagcttctttctttcacgatgattcgattccaagtgaatttcaactggaagcggataatattatagtagaaaaagctttaaatcgttatttagaaagcgatcaaaaattattattatttatacatcggaatgctaatgtattaatgaatgatgatgatgaaagcttgcttcaacttttattgaggtatgaagaacaaggtttaaatttaaaacaaattgttttagagattacagagcatgaatgtaaagaagatatagagcaatttaatcatttgcttatgtattatcgtacatatggtattcaaatttcgattaataaagtcggaacgggcacaagtaatttagagcgtattagcgtgttagcacctgatattttaaaagtagatttaacgaacttaaggcaaacagcacttttacaatcttatcaagatattttatattctttatcattacttgctagaagaattggtgcaactttgttatatgaagaaatagatgctttttatcaactgcaatatgcttggaagaacggcggaagatattatcaaggtaattatttgaaagaatgtttacctgattttattgaaacgaatgttttgaaagagcgactaggtaatgaatgtcatcagtttattcagcatgaaaagaagaagttacaaaaaatttataatttaacagagatgttacgcgatcgcattggcgatgttttatcaaaacaaaaaaagaatgaagatataaatgattggttattacaatttagtcaaagtgtatcacagtgtagttttcgtatatttatttgtaatgaagatggtttccaacaatcaggaaatgttatgaaaaaagatggagaatggattgtgatgccggattattatatgaagaactggagttggcgcccgtattttctcgagaatatcatgaaaatgcgttttgagaataaggcgaggctttcagatttatatgcagatattgaaacgggagaaatggtacgaacattttctttcccgattgatgatgacaactttttatttatagatttatcttatgaatatttatatgaagaagatgttttattttaatgcacgaagagattcgtgcattttttgtttgtttttatcataaattggtaatagtgaaaatggtgatgaaaatgctgtctatcgttgtaaagattttacgaacgaaatctgtcctgtctttgcataatcattgttacaatgaatactacaaagacaagttcttttaaaaggaaggtgaaaaaatgaggaaatatggaatatggcttgttctatttgtatgtgttgcctttctagttggttatagtgttacgactgttttaggaaaagaggaagtggaagtcgatcggaaagaagtatttacaacgatacaaaaaggctatgaaacccagttttcaattcgtgggaagcatttgccgatgaataagatgatagagacgttatcaccgtattttacagataatttccttcaagtatttacagatgaaaatagcagaagtgataaacaaagtggtgaatatttacttccggcaaaagaagcaccgttttcttttaattcagaaacgaaaatgtcgtatgatgaagaacataaaaatttatatgtatatgagcggacaaaaagtggacagtatcaaattgtaacattgaaaagggatcaagataaatggaagctagcaggatatcatgaaagtcaggaacttttaactgaaataaaaaggttgcaacaattataaagtgaaacttttaatcagtgggagggattactcttccatctaacttctttgctgtagctaaatttggggtaggagttttactacccacaaatagcgggataagaataggaataggtatttacctattcctattctatattgagtagttgttgtaacttttcaatttgaaaccctgcaactacttcgccatcaattacgactgttggagttgaataagaatcatagtcgtataaaagacgattgcgagcagcagcgtctttttttacgtcaaattcttcatatgcaacgttattatgcttcaaaaattctttcacaataacacagggcggacaatcgggttgtgtataaacctcaatttttttcattgttattcctccttttttctgttttttattatattcttccagtataaaaaccgcaataaagaaggggaaatatgttctttctgttttttccttcgcatttcgacaaatttttagttgagtttctggccaataacctttatcctagagtgtggaacattttttctgttatgacggatagaatgagtatagctgtaaaacctattggtaggaagatcagagaaaggagagatttcatgtctctactccaaggaattttaactcgacttgttagtctacaagaacaagctgaaagcggtgaagtagcacaacgctattttgaagtgaacggtgagcgcaaatgtagcgtgaaatttttcgataaaagtgaaatgtatgagttagaagtgtatcaacaaggtgaaaaacctcaagtgtatcaattcgataatatcgacatggttgcaattgagatttacgatatcatttcttgatacatataaaaaaggtactgccatgtggcagtaccttttttagttctattactttctagtggaatgtatagaagttttttatttttcctacaatggtattaaaatgaaattttaatccgtgcaagtttgcttatccatgtggaaaatgagtcccgtcaaccgggtgaatatgtgaagctaaacttctcacaatcgctgggttctgcaaatagcgggagaaatataactaggaggttatcgtatggaacgtttaccagttgtgatttgtcctaattgtcaaagttctgctgagattattcatgtattaacggctcaatctaatcaaaatgtaatttatacgtgccaagtttgtcactttgtaattcgaaatattgaaacgaataaaggataggaagttataattttagtttttgtcccatacaatgagaatacgaaaagtctgtctaattgaaaggacgtgactctgtggacggtgcacataaattttacaatgtttcagagagacatttaaattttgatatggtctttaaccgtatttgtagtttcattgaaaaggatccgcgaaatttatatcgattatccattgggacagactcacaagcgcatcaaaaggatacgaggtttattacagcaatccatattcatcgtgttggaaaaggtgcctggggctgtttacaccatagatcagtaaaagataagccggcaaccttacgtgagaaaatatatttagaaacgcagtttagtcaagaaatcgcatgtctatttacgcctactcatatacaaacaatatgggagttattgcatccttatgctcaagatggggctggattcataatggaaattcatttagacattgggaatgatggtttaacaaaagaatttattttagatatgacagaaaaaattcgagcgatgggattaactgcaaaaattaagccagatgcttatgcggcgtttagctatgcaaatcgatatacgaaatgattttttttgtatgtatacgattgctacatatcttttaataaaaactgaatattacatctattaaataggttgaattttttatataataagagtaacgatgcgagtgtaaggagaggggtatatgcaaagggaagttgttttaacgaaggaagaagaaagtttactactagatattttatttcagcaaaattacgcaagtgaaattttagctgtggaacttacagatattgagaatggtttgaaacagacagatgtgatgcaatataaaaaaatcacaaggttattttacagattaaaaaataaagggtattaagcgctaccggaatggtagtcttttttttgtgctgtatgctaaaatagctgtgtgattgtatttttattgaaataaatttaggacaaaataataatatgaaaacgctgtcataaaatgtgaatagagttgtgaacataagcaggaaaaagggaaaatgggggatgtaatatgattagtattccgaaagacgaatttcaacaaattcttgtgaaggatttaatgatttcatcggaaaaagtagctcatgtccaaattggaaatagtttagaacatgctttactcgttcttgtgaaatctggatattcggcgatacctgtcttagatccaatgtataaactacatggtttgattagtactgccatgatattagatggtatgttaggattagaacgtattgagtttgaaagactcgatgatatgaaagtagagcaggtgatgaaagaagatatacctgttcttaaattagacgattcatttgcaaaagctttagaaatgacaattgatcatccttttatttgcgctgttaatgaagaaggctattttgaggggattttaacacgtcgggctattttaaaattgttgaataagaaagtaaggcaacataatcgataacgtaagaaaagtgacttcatagaaacgaagaagtcactttttttttcgtgcatatcacttgtgtatgtattatatttaaaaagacataaaacataaggaaagtttgcgctggacaattgtattttctgaatgaaagcattcgggtaaattaaggatgaaaagcttattgaaataaggtgtatggaagctaaggaaagagggagaaagttgcaaattgatgattttcaaatgatggttgtgttagctcaggaatcaaatatgagaaaagcggcggaacgtttatttgtttcccaacctgcgctgagtcaacgattacaatctatggagaaacaatggggaatgaagttttttattcgctcacaaaaaggattgacaattacacctgaaggggaaaaagttgcaaattatgctaaagaaatgttgcaaagggaagaagatataaaaagtgagctagctgttttcagaacggaaactcatggaacgttaaaaatagctgttgcatcagttattggtcaatattggctccctcctgttttgaaaaagtttgtgcataaatatccttctgtcaagatatcgctgtttactggatggagtagtgaagtgcaaaagcagttttatgaaggagacgttcatgttgctatactgaggggaacacaagaatataaaggtcagaagcaacaattatttgaagatgaactgtatttagttgataaagaaataaaagatatttcgatgttaaaagaaacaaataggccgttcattcaatttaaaagtgattcgacttattatggacaaatacaaaattggtggtatggtttattttctaatccgcctaagcgaacgattgtagttgaccaaattgaaacatgtaaacaacttgttttaaatggtataggttatgcccttttaccttctactgttttaaaggaagtacaggaaaatatgtataaaacacctgttcaactgacgagagaaacatggttgttaacaagtgactcggcaaggcagttgaagcaagtacaagcatttttagaaattatagaagaaattcaaagggaaaaataagattattatcttgctactcgctctttcgtttggtagagtaacattataaatggatttaggaggcaacaagaatgaaaatgatggacgctaacgaaattatttcgtttattcaaaaaagtgaaaagaaaactcctgtaaaggtatacataaaaggggatttaaaagaagtaacattccctgaaacagtacaagcatttgtgaataaaaagtcaggtgtattattcggagaatggtctgaaattaagacaattcttgatgagaataataagcacatcgttgactacgttgtagaaaacgatcgtcgtaattctgcaatcccgatgcttgatttaaaaggtattaaagctcgcatcgagccaggtgctattattcgtgaccatgttgaaattggtgacaacgctgtaattatgatgaatgcaacaattaacattggtgctgtaattggtgaaggttctatgatcgacatgaacgcagtacttggtggacgtgcaacagtcggtaaaaactgtcacgtaggtgcaggtgctgtacttgcaggtgttattgagccaccttctgcaaaaccagttatcgttgaagatgatgtagtaatcggtgcaaacgtggttgttttagagggtgttacagtagggaaaggtgcagtcgtagcagcaggagctgttgtaacagaagatgtgcctccatacacagttgttgcaggtactccagcacgtgtaattaaagaaattgatgagaagacaaaagcaaaaacagaaattaaacaagagcttcgtcaattaaacccagagaaataaaaagtaaaaaaagcgtaagagcgtaaatgggctcttacgctttttatagatagaggtgcaaaaatgacagtaagcaaatttatccaaattcgtagagatttacatagaattccagaaatcggatttaaggaatggaaaacacaacagtatattttagattatataggaacactttctcatgaatttgtggaagtgaagacatggaaaacgggtgtaatcgttaaagtaaatggaaaaaatcccgaaaaaataataggttatcgtgcagatatagacggtttaccaattacagaggaaactggatacgagtttgcttctattcatgaaggaatgatgcatgcatgtggccatgatgtacatacaacaatcggtttaggccttctaacgaaagctgtgagcgaaagaatagatgatgaccttgtatttctattccagccagcagaagaaggaccaggcggtgctcttcctatgttagaaagtgaagagttaaaagaatggaaaccaaatataattcttggtcttcatattgcaccagaatacgctgtggggacaattgcaacgaaagaaggactgttatttgccaatacttcagaattatatattgatttaaaagggaaaggtggccatgctgcctatccgcatactgcaaatgacatgattgttgcagcgagccaccttgttacacagcttcaatccgttattagtcgcaatgtgaatccacttgatagtgcagtaattacaatcgggaaaattacaggtggtacggttcaaaatattattgcagaaaaatctcgtttagaaggaacgattcgaacattatcagtggaatcaatgaagcgtgtgaaaagcagaattgagtcaattgttgcaggtatcgaagcttctttccagtgtgaggcgattatagattacggagcaatgtatcatcaagtatataaccatgaagagttaacgagagagtttatggaatttgtacataaacaaactgatatgaatgttattacatgtactgaggcaatgacgggtgaagattttggttatatgcttcgagaaatccctggatttatgttttggcttggagtaaattcagaatatggtttacatcatgcaaaattaaaaccagacgaagaagtgattgaaaaggcaatcacatttttaagccaatatgtaaagtggaaagggaatagaaaataaaacttccgctctcttgaaggttccaaaaaactttttgttctgaggtgtaagtaacgctcgtatagattgattttagacatttacatacaaatggaagaattaaagttaattgtactgttttaataatgagcagggggtttagccactgctcattattaattatttgactaacttatatatgtttacttttagtatgaaaagtgtgtaaaatcaatgtgaaacatagaaaaaagggtggggaattacgtgcaaattagcagtgcgattttatgtttcgtcttatatgcgtatgttattattgcggcggtttattttgggataagtttttatgcctatcgtctagtagataataatgaatatgacgaaacatacaaatgggtgaagagatatttatcacctgtactagaaattatgaatgggtttgtgctctttttatttattggattaattgctttctcaacgagtttagtagggaataaaactacgttatttgtattgggtatcattatttttatgttgttaggaataaggattggtaatacggtcttttgggatgaaagaaaagtagatggttggacgggaatgttaattccgtgcatgttagctgcaatcgtgacaaatatagagcatgaatattatcaattacatttttggcttattatcgttttaacaattctttctgttttgtatataagcacagtagtactaacatatattgcacatgaaaaaggagatgttaaaggcactcgtttctttagaggacgggcattattttggagtgtgccgacgatggcagttatcgcgcttattgcgatattagtaaatggatatcaattttctaattggcaactatttttagaaaattggtggatctttatcttttcgtttattgcttttttaggtgcaacgcattatttattccatcaacatcattacatatgggcgttgttatttgcattcacacagcttctatttgccttttttggtcaagaaacattattattcgtttttgaaacatttagttcttttggaaatatatttgtatttgctatgctacttgttggtatcgctttttacttgcaacaatatttttatatacaaaaacaaaaataagagctaatcatagtttttgtgacgcatataaagtgtgttacactgaaaataaatagtacttgaagttattggaggaattcttgtgggtgagaaagaaaaagaatttgctgtcattggacttggtcgctttggtggaagtatttgccgagaactagctcaattaggtatggaagtaatggcaatcgattcagatgaggataaaattaatgaatttgcaaatatagcttcgcatgctgtaattgcagattcaacagatgagatggtattaaaaagccttggtattcgaaattttgatcacgtagtcgttgctattggagataatttaaattcaagtattttaacgactttgattttgaaagagttgggtgtaaaaaatattactgtaaaagctcaaaatgattatcatgaaaaagtgttaagtaaaataggtgcagatcatattgtgcatccagaacgtgatatgggaaaaaggattgctaataatattgcatcaagcaatgtgctagactaccttgagctttcagatgagcatagtattgtagagattattgcgaataaaaaaattgatgggcactctttaattgaattagatattcgtgcgaagtttggattgaatattgtagcaattaaacgaggcaaagaagttatcgtatcccctcgagctacggagaatattcaagcaggagatatattaattgtcattggtcatgacgatgaagtggatcgatttaaacactttttaagataagagaaaagaaaaggacaatgccttcatggcattgtcctttttcttatatttccataatgattggtaaaatcattggacgacgtttcgttttctcatataggaatggggctaatgtgtctgtaatttcatttttaatttcagaccattgtgttgttttacgctccattactttttctaaatgagttgtaattaatgtttgtgcatcattgattaaatcgctgctttcacgcatgtaaacgaaaccgcgtgagatgatatcaggtcctgctgcaactttaaattctttcatatcaatgcttacaactacaattacaagtccttcttcagaaaggatacgacgatcgcgtaatacgatattgccaatatctccaataccgtttccatcaatgtagaccgaaccagatgggatttttccagctacgctagcttcatccgaacgtaaagcaagaacatcgccattatccataatgaagcaattttcttcagggatgccacaatcatttgctatgttcatgtgcatacgctgcatacgatattcaccatgaattggcatgaagtacttcggtttaattagacgtaacattaacttttgttcttcttgtccaccgtgtccacttgtatggatatttgaaagtttcccgtgaattacatcagcgccagcgcggtacaacatgttaattgtacgacttacgctaattgtatttcctggaattggtgaagaagagaaaacaactgtatctccaggaataatttgaatttggcggtgtgtaccatttgcaatacgtgaaagtgctgccatcggttcaccttgactacctgtacataaaataacaactttattagctggtaagcggtttagttgagatgcatctatgaatgtatctttcgggcaacgaatataaccaaggttttgtccaatttcaatcgctgcttccatacttcgaccaaacacagctactttacggttgttttcaacagcagcttcaacaacttgttgtaagcggtggatatttgatgcaaaggttgcgaatataatccgtccttctactttacggaaaatgtcttgaatgctatcaccaacgcgacgctcagacatagtaaagtttggaacttcactgttcgtactatcagataatagacatagtacgccatctttaccgatttcagccatttttgttaaatcagctggttcaccaactggtgtgaagtcaaatttgaagtcacctgtatgaacaacttgaccttgaggtgttttcacaacaacgccgtacgaatctggaatactgtgagttgtacggaagaaggatacagacgtttttttgaatttaataacgtcatcttcttgaatctcgtaaagttttgctttacgaagtaagccgtgttcttctaatttgtttttgatgagtgcaattgctaattttccgccgtaaatcggaatgttcacttgacgtaataggtaagggattccgccgatatgatcttcgtgaccatgtgtaatgaataaccctttaattttatcttcgtttcgcacaaaataagtgtagtctggtattacataatcgatcccgagaagttcgtcctctggaaatttaattccagcatcaattataataatttcatcttgaaattgaacagcgtatgtatttttaccgatttcaccaagcccaccgagagcaaatacagcaacttggtcgttttttagaaatttcatatcgctatacgatttccgctaatgttaaatcagcgttttctttttcatattcaagatgagcgccagtaacagactgaacaaactcgatattatatgcgaacttatttaactttgtacgaacatccttttcagacgtagcctctaaatataaaacttttgtattttcacgtactggaacctcagttaatttttcttgataaaatactttaaaaatcatttggaaaacctctccttgtctatgttttgcattatctgttacttattataaagcaaacagtcacgattttcatgttttttcgaatgagaatgaagaaaaagcccgaaatgggcacaatttaagcgattgtctttttacggactagaccgtttaaataacgcttgagctttttcttcagcttcttcagcatgattactccttcctttccttattttaaacatgcctattactagtgaaaactctatctctgatataagagataggacaaaagtgaatggtgaatcttgtcctttcccatacagtgaaagttattctatagtaacgatcagtagccgttagttataggtatagtatgaggaagaatggaaaagaaaattcatccgaacaagtatctacatgttttactaatatatatatgcaaagtttacaaataaggtcagaaagggaacgctttcttcacagatgtttaatatgttatacttttttttagaatttgaaaagtgatattcaaaataggaatatagagtcccagaaaggattttgacaaatgaatgataaaattgtcttttttgatattgatggaacattattagatcatgataaaaaaattccgcaatctacacgagatgcagtaaaacagttacaagaaaaaggtgtacatgtagcaattgcgacagggcgcgcgccatttatgttcgaagatattcgcagggaacttaatatacataattatgttagttttaatggacaatatgttgtctttgaagatgaggtaatatttaataatccgttacatccagatgctttacataggtttactcagtttgcaaaacaagaaggatatccacttgtatatcttgaccatcaagatatgagagcatcagtggaatatcatgattatgtgaaagaaggctttggaagcttaaactttgagcatccagcatatgagcctaatttttatgaggaacgtaatatttatcaaacactacttttttgtgaagtaaatgaagaggaaaagtttattaatcattatccagattttcattttattcgttggcatgcatattcaatggatatcattccgaatggtggttctaaggcaaaaggaattgagaaatacattgaaaagttaggttttaatcgtgatcaagtgtatgcatttggagatggcttaaatgatttagaaatgatcgaagccgttggcacaggtattgtgatgggaaatggccatgaagacttgaaaaaacttgcaaatcatgtgacaaaggatgttaatgaagacggtatatatcatggactaaagtgggctggattgctataagtgaatatggaacccatttcataataaaaaggcggaagattaacttccgcctttttattattatcgctctagaggtttggaatcatcaggagcggcaaaaggattttctttattgatatggtcatagaacataacgccatttaaatgatcaatctcgtgttggaatacgattgctggtaaaccttttaaacgtaattttacttcttctccgttaatagaagttgcttttactgtaattcttgtataacgaggaacataaccaggtacttcgcggtctacagacagacagccttcaccaccctgtaaatatgtacgttcaacagaatggctaatgatttttggattgaataatgcatggctatataatgtaccatccgcatcggttacatgaactgcaatcattttttttgaaacaccgatttgcggagccgctaatccgattccagggcgtaaactatatttttcagccatttcaggatcttggctatttattacgaattcaatcatttcttttaaggtagttgtatcttcttcgcttgccggtaatgacacctcttctgcaacgttgcgcaaaataggatctccttcgcgaataacatctttcattgtaagcatatgtaatctctcctttcctctttagtctaccaaaggagatggaaaaagtcatcggcaagaaagggaaggcattttggaaattgttctattatagagtagttatgtatgtgataaaaagaaaaagacagcaaagccgtctttttctttccatagttgtttcgttttacattagcgaatgcaagcagcaccaacgataattaaaagaataaacaacacaacgattaaggcgaagccgcgtccagacccgccacaagaaccgccataaccgtaggaaggatatgaacaagttggatagcaatatgagtatccgtacatgagatgacctcctttatcatttcccgctaatactgcggttactataatgtatggaagagagggtagaaatgtataggtatttacctaaaaaaggaagagtagtttgtatatttttgttacgaagagagaaaaactaaagagaattaaatcgtttacatattattctaagagaaaaaataagtgaaaaagggaataatataacagtaggtcaatgcttactaatacagatgtaaaaaataaaaacacgtttgtgtagtagaaacctgcatattatttataaaaaaacgtattcaaagtaattgacatcgtaattagaatagttgtaaactaaaaaacgtgatcaagattgtattaatatgtttctgaaaaaacattagtacagattgttaggtacacaaaattattctcaaccgacatacaaacatgttggtttacatcgttgcgctttttaaactggaaaatagccagtgaaagcgtttcagaatatggttcaagagaggaagaggtgaacggaatgggtactaaaacaaaaaagaccctatttaatgttgatgagcaaatgaaagctatcgcagctcaatttgaaacattacaaattttaaatgaaaacggtgaagttgtgaatgaagcagctatgcctgaattatctgatgatcaattaaaagaattaatgcgtcgtatggtgtatactcgcgtattagatcaacgttctatttctttaaaccgtcaaggacgtttaggtttctacgcacctacagctggacaagaagcttctcaattagcaagtcatttcgcacttgaagcagaagacttcatcttaccaggataccgtgatgtaccacaattagtatggcacggattaccattataccaagcattcttattctctcgtggacacttcatgggtaaccaaatgcctgagaatgtaaatgcattagctccacagattattatcggtgcgcaaatcatccaaactgctggtgttgcgttaggtatgaaactacgtggtaaaaaatctgttgcaattacttacactggtgacggtggtgcttcacaaggtgacttctacgaaggtatgaactttgcaggtgcattcaaagctccagcaatcttcgttgttcaaaacaaccgttatgcaatctctactccagtagaaaagcaatctgcagctaaaactgtagcacaaaaagcagtagcagcaggtatttacggaattcaagtagacggtatggatccattagctgtatacgcagcaactgcttttgctcgtgagcgcgcagtaaatggcgaaggccctactttaatcgagactttaacattccgttacggtccacatacaatggctggtgatgacccaactcgttaccgtacaaaagatatcgaaaacgaatgggaacaaaaagacccaatcgtacgcttccgtaagttcttagaagctaaaggcctatggtctcaagaagttgaagagacagtaatcgaagaagcaaaagaagatatcaaacaagcaattgctaaggctgaccaagctccaaaacaaaaagtaactgatttaatggaaatcatgtacgaaaaaatgccttacaacttagctgaacaatatgaaatctacaaagaaaaggagtcgaagtaagccatggctcaaatgacaatgattcaagcaatcactgatgctttacgcgttgaaatgaaaaatgaccctaacgtacttgtatttggtgaagacgttggtgtaaacggcggtgtattccgtgctactgaaggtttacaagctgaatttggcgaagatcgtgtaatggatactccacttgcagagtctggtattggtggacttgcagttggtcttgcacttgaaggattccgtccagttccagaaatccaattcttcggtttcgtttatgaagtaatggattcaatttctggtcaattagctcgtatgcgttaccgttctggtggacgttggactgctccagtaacagttcgttctccattcggtggtggtgttcatactcctgaactacatgctgatagcttagaaggattagtggctcaacaacctggtctaaaagttgttattccatctactccatacgatgctaaaggtcttttaatctctgcgattcgtgacaacgatccagttatctacttagagcatatgaaattgtaccgttcattccgtcaagaggtaccagaaggtgattacacaattgatttaggtaaagctgatatcaaacgtgaaggtacagatgtatctgttatcgcttacggtgctatggttcacgctgcattaaaagctgctgaagaacttgaaaaagaaggtatctctttagaggttgttgacttacgtacagttcaaccattagatatcgaaacaatcatcgcttctgttgaaaaaacaggtcgcgtagttgtagttcaagaagctcaaaaacaagctggtattgcagctaacgttgtagcggaaattaacgaccgtgcaatcttaaacttagaagctccagttgtacgtgttgcagctgctgatacagtattcccattctctcaagcagagagcgtatggttaccaaaccacaaagatattgttgaagctgtaaacaaagtaatgaacttctaatttttagcttttcatgtgcaaaagaaatcagcacatgctggtttcttttgtacatattccataataatgaaatgaatcagggggctgaattccgtggcatttgaatttaaactaccagatatcggtgaaggtatccacgaaggtgaaatcgtaaaatggtttattaaaccaggcgatgaagtaaacgaagacgatgtacttcttgaagtacaaaatgataaagcagtagtagaaatcccttctcctgttaaaggtaaagtacttgaagtacttgtagaagaaggaacagttgcaatcgtaggagatacattaattaaatttgatgctcctggatacgaaaaccttaaatttaaaggtgacgatcatgatgaagctccaaaagctgaagaagcagcagtagaagctccagcagcggaagctactccagcagcaactgcagaagtagtaaatgagcgcgtaattgctatgccatctgttcgtaaatacgctcgtgaaaaaggtgtagacattcataaagtagctggtactggtaagaatggccgtatcgtaaaagctgacatcgatgcatttgcaaatggtggacaaactgtagcagcaactgaggctccagcagcagtagaagctactccagcagcagcgaaagaagaagcaccaaaagcacaaccaatcccagctggtgaatatccagaaactcgtgagaaaatgagtggtatccgtaaagcgattgcgaaagcaatggttaactctaaacacacagctcctcacgtaacattaatggacgaagtagatgtaacagaacttgttgctcaccgtaagaagttcaaagcagtagcagctgacaaaggtattaaattaacttaccttccgtacgttgttaaagctttaacatctgcattacgtgaatacccaatgttaaacacttctttagacgatgcatctcaagaagtagttcataaacattacttcaacatcggtatcgcagctgatacagacaaaggtctattagtaccagttgttaaagatacagatcgtaagtctatcttcacaatctctaacgagatcaatgatcttgctggtaaagcacgtgaaggtcgtctagctccagctgaaatgaaaggtgcttcttgcacaattacaaacattggttctgcaggtggacaatggttcactccagttatcaaccacccagaagtagcaatccttggtatcggccgtatcgctgaaaaaccagttgtgaaaaacggtgagatcgttgcagctccagtattagcattatctctaagctttgaccatcgtttaattgacggtgcaactgctcaaaaagcgttaaaccaaattaaacgtctattgaatgacccacaattattagtaatggaggcgtaataacaatggtagtaggagatttcccaattgaattagatacagtcgttgttggtgcaggtcctggtggatacgttgcggcaattcgtgcagcacaattaggtcaaaaggtagcaatcattgaaaaagctaaccttggtggcgtatgcttaaacgttggatgtattccttcaaaagcgttaatcaatgcaggtcatcgttatgagaatgcaatgcattctgatgacatgggtattactgcagaaaacgtaaaagttgactttacaaaagttcaagaatggaaaaacggcgtagttaagaaattaactggcggtgttgaaggccttcttaaaggtaacaaagttgaaatcattcgcggtgaagcttacttcgtagatgctaatacattacgcgttatgactgaagatgcagctcaaacttatacgtttaaaaatgctgttcttgcaactggttctacaccaatcgaaattccaggattcaaatactctaaacgtgttatcaactctacaggtgctttaagcttacctgaaattcctaaaaaacttgttgtaatcggcggcggttacatcggtatggaattaggtactgcatatgctaacttcggtacagaagttactgtagtagaagctggcgacgaaatcttagctggtttcgaaaaagctatgagctctgttgttaaacgtgctctacagaaaaaaggtaacgtaaatatccatacaaaagctatggctaaaggcgttgaagaaacagaaactggcgtaaaagttagctttgaagttaaaggtgaaatccaaactgtagaagcagattacgtattagtaactgtaggtcgtcgtccaaacactcaagaaatcggtcttgagcaagttggagttaaaatgactgaccgcggcatcatcgaaatcgatgagcaatgtcgtacaaatgtaccaaacatctatgcaatcggtgatatcgttcctggaccaccattagctcacaaagcttcttacgaaggtaaagtagctgtagaagcaattagtggccatgcatcagctatcgattacatcggaattcctgcagtatgcttcactgatccagaactagcatctgttggttacactaaaaaacaagctgaagaagctggaatgactgtaactgtatctaagttcccattcgctgctaacggtcgtgcattatcattaaacagcactgacggtttcctacaacttgtaacacgtaaagaagatggtcttcttgtaggtgctcaagttgcaggtgcaggtgcttctgatattatttctgagattggtttagctatcgaagctggaatgacagctgaagatatcgctcaaacaatccatgctcacccaacattaggtgaaatcacaatggaagcagctgaagttgctcttggaatgccaattcacattgtaaaataatttaagtaatgtaaatagcccttctcttattgtaagagaggggctatttttattttcatcaaatgacttgcaaggtctttaaacgtacttgtcgaatgaatatataatactttaacaaatgattcaggcttaacttacttcgaaggtaatatatatcatcctataatatgtaattgattcaaacttacccccatatattaataaaatagagcatgtcaaaggagaaggttccatgaaaatattacatgttatattttatcatttactactatggagtggcttttccactgtattaacattatcgaatggtgataagtttcattataaagttattctttttttcgtatttctatatttagcctatgtaatagcatattttgtattgcacgtaagaaagcaagctttatttcttacatgttcgaattgtatattatttttaatcatattatctattttttaaattagcgtttataaaaatacattgttcttccattaaataattgtaactctccttctaatttcttcgctaaaaaacggcaaaattcatttgctttccctttgtcaccaaatgttgcattaggtggtaaagaaacttggatgaaagattgttcattttctataccaacaccaatataaattgagtcataccggtcgtgagtggattgaagttttaatgttgttgtagatgtatctaaaatttcataaggaaaagcggtatttgtatacgtgtaattaatttgggcaccagttttagaagtaactgttttataataatgaaaaagttgttttatatcatctattgaaactgattgttggttggatttcggtacaagcgtaataaaggcgtgttgcatataagttccccctagcttagtagaatactatcattctacatcctactgaattttttgacaattaaaaggagtattacatgttttgtttaatatactattaatgaaacgtgatgtagaaaggtggaaaccaatgtttgaaaaattgtatgatgagcatgaaagtgtgaaggtacgatttttagggtttatgacacatgatacacgttatgattttggtgttatttatacaaatatgttttttggaaagccgctcattgtttgtatgcaaacaggaaggtctactttactcggacgagatgatgtagagaatgttcaatatatacaggagatttttaaattaggatcagaagaggaagcaaaggagttagctcagtttttcaaatttctagttccgtcaacttctttacatgcggaatatgaagaataattaatgtgaaacagtcgtacttataaatatggctgtttttttattttaatatcgcatactaatttaaattaaaaatatttaatgtgttatactaaaaacctattgacgtaaaaagtataacatattaaaataaagacagaaagttaagcggttacaaaaagtttttgggattataaacttagggggaaatgaaaaatgggaacaatcgtatgtcaagattgtgaaggtacaattgcacacttcgaagatgagaaagtaacggtactttacgggaaatgtggatcttgcggatgtgatcacacagagcatacaaaagcccaataattgataggaaatggacagctaaaagtttttaggaccataaacttagggggaaatgaaaatgggaacaatcgtatgccaagtatgtgaaggaacaattggacattttgaagatgaaaaatcaacagtactatacgggaaatgtggatctcattgcgaatgtgaccataaagaacatacaaaagcttaataataagaaaaagcgcctacatgtgtaggcgcttttttaataaattgtagttgtatgaccaactgttgcaacgattgcatcatctctaattggaataaagcttatggatgtctgtggtgtactagaagaagcatattggctcattatacggctatcgatacgggtaatagtatcggtcaagaaagctgaaataaaagcgtaagggactcttcgttcatttaatgaataaataatttcttcttttgtttttacacccacgccatgtccgtaaaaaaagaaatttcctaaatagattgtgttttctccttgccactcaatcgtagctggattcacttgtgggtttttaaagtaaacgaggtcacctggaacaagatcgccaccgttttttgttatgagccttagatcttgatcgtagtcccatgtataaagtaaaagatttgcaaatagacgattgaaagtttcttcctcatacaatgatagtaaagctttataaaaaataatgatcatagcggttgcgcattcagttccatatagttttccatttttaaaaatatcttgtatggcaatagaagatggtatgtttggaagaagctcgaatcctccaagggatgttcttttccaatactgggggttgcaaaaggattgttgaaatgtgcgaaactgaaatccactttgaaaaagctctagtgcagagataataatattaactcgtaaattgagatcaaagctgagttcatcagctgttcggaaggaataaacttcttgatttcctgccattattgataaaatttgttgtttctctgctgcaaatggctcatattcatttgtaatataaggatgtacaatagaacggcctattacaatcataatagtatccccacctatacgttacattcttaagtatcgtatgaagaaaaggaaaaaaggtgaaaaaaaagcctatcaactgataggcttgtactctttaataacacgtaatgtttgtaatgtcatatcttcaggaccttgtacaggtaaacctgcttctaagtttttccgaatatactctaagttttcttgtgtaataatttcccccggagtaaagattggaatccctggcggataaaccataacaaaatcagctataatacgacccgctgcattttcaaatgggatgacttctgtttccgaataaaaagcatctcgaggagaaagtgctagcactggaatttctggaatctctacttgtacttgaacacctttatctgccctatttctaaatgttgctgctaaatcgtgtaaagctgcaataagtgtatttgtatcactttctgtatctcccaaagtgataagacatagtatgttgtatagatctgagagttctacttcaatgttatattgctctctaagccatacttcagcttggtggccggtaatacctaaatcttttacagatacaattatctttgtaggatcatagttaaaggtagcatctgtacctaacatttcttttccaggacagtaaagatgctcaatagaatttatagcatcacgaacatgctcagctaattgtattgtttgttctatgagtgctgttccttctgtagcaagacgttttctcgcaacatcaagggatgctaacaagatgtaagaagttgatgtagttgtaagcatgctaataatagattggacatgctttacattcactaagccttctttcacattaagaatagaactttgagttaaagagcctcctaatttgtgaacacttgttgctgccatatccgcaccagcttgcatcgctgacataggtaattcatcgtgaaaatgaatatgaacaccatgagcctcgtcgactagtacagggatgttataagaatgtgctaattgtacaatctgttctaagtctgcagcaaacccaaagtacgttgggttaataacaagtaagccctttgcatctgagtgctcttccagtgcttttttgacagattgaattgtgattccatgagaaataccgagcttcggatcgatttcaggatgcatgaaaatcggttttgcacctgagaaaataatagctgacattactgatttatgcacgtttcgtggtactaggattttgtcaccaggaccgcaaacgctcatcaccattgtcataatagcgccacttgtaccttgaatagaaaagaaagtatgatctgcaccgaatgcagcggctgctaaatcctgtgcttctttaatcataccttttggatgatgtaaatcatcgagtggcgcaatattaattaaatcaattgctaatgcattatgcccaataaattcgcgaaatgtaggatccatgccctgtccttttttatgaccaggaatatggaattgaattggatttcgcttactgtgctcaactaaagcggtaaacaatggtgtttcgtattgggacaatctatacaccccttcttcttcataatatttagtgtaatttgttttatataatcctgctctaaaaaagtgtagccttttttagaataaggcttgtttttctgccattcaaaaaatcgtttttgagatggtagcttcactttattttctataaaacaaaagcattatatcaccaataattatagatgtatagaaaaaaatgtttttaaggtgagtatgtttaatagttagcctcaactaatgaatagaggaagacaattccattaaaatgaataaatagtgtataatgcagagtggctataatgaagaataaaatattctctttaagatagcataatgaaacaagaagaaatgataaatgaggtgcgaaatggaatatcaatatccgttagattatgattggtcaaatgaggaaatggttacaattgttaagttttatgaagcgattgagaaagcttatgaaaaagggattataagagaagagttaatgggtttatatcgtcgttttaaagagattgttccatcgaaagcagaagaaaagaaaattgataaagaatttcaagaagtaagtggatactctatatatcgtgctattcaaagggcaaaagaagtcgaagaacaaaagctcgtaaaaatgtaaaaaatattttgaaaaataaaaactgaagtgatataatgtgataacaactaaaaacggacaatataaattgtccgttttctactatcgattacacagtgcatataaaggaaggagtgattgcatcgtagattcaatcttagcaaggaattgttcgttggtcattgctgaaaactcctctggtgatatatgaataccaactaataattctgctttttttacagtagctaatcgttcaatcatcttttgtaagtcttcggtttcaagtgttttatgtaatttcacacttggtttagtatggtcaatggaccaaacgaagtcatttggaatatttgtttttaaatcatttaaatgttctaagaaggcatgagccgtctcaactttttgtggacactcatagattaaaccaaagtatatgaaggcatgagtaccccataagccgatttggaaatgcggtagcattttatatcctcgtttatttgttgaaaaagcaacccaagtatcgtttggtggattgactttgcggcgtgcgtgttttgcaacatgataaaaaaagttctcatcagtttgtttggataagtattctgcaaattgttcccctaaagcttctagcttaggatgaatgttcgttttaattgcactcattcgttcttcgagaccatcaactgtaaagacatcaaaatcagttgacttgaatgtttgtattgtcatgattgttcctccaactcctattttgcttttattttagcatagcttgtactattcataaaaaaaacagcacaaaaaaatttaaataaaaaaatataattttgttgcatagatgatttatccaacatagtatagtataaaacaaaaaatcagaaaatttaattaattctagtccgagggcagacgaatattgggaggaggcaaataatatgagacaggtgattaatgcgttaaagagaacagatgctgaaaagagaataccggtgctacgtttggagctagattatgaattagcaactttatatgatgcgatgatggaagatgacaaacagaaaaaagaagagtgtgtacaaaagttagaagtgttaagacttgaaatgattcgtttagaagcgtaataatagtatatgtataaaaaattagttggtgcgaaccttataaagggttcgttttttctgtgaacagtatagatcggagtgtttaaacatgcaagaagtatggaaagacattgatgcacacgccaaacggtggattcgggatgcaggagagcatttaatggcatcaatgaaaaaagcacttattatagaaacaaaatcaaatgcagctgacttagttacaaatatggaccgagagatagaacagtttttaattgggaaaattaaagaaacattcccgaatcataatattttaggagaagagggttatggagacgagataacgtcttctgacggggttgtttggttaattgatccaattgacggcacgatgaactttgttcatcaaaaaagaaattttgcgatttcaattgggatttatgagaacggtatcggaaagattggacttatatatgatccagtgcatgatgaactatatcatgcagtcaagggatatggagctttttgtaatgatatatcaattcctacactgaaaaaaggaactgtagagcaaggtattgtagctttaaatgcgatatggcttacagataatccattgcttaatatggaaagtatgatggcacttgttaagaaagcaagaggcacaagatcatatggctgtgcagcgttagagatggtatacgttgcaacaggaagaatagatgcatatgtaacgccgagattatcaccatgggattttggcggaggaaagataattgtagaagaagttggaggtaaggtgacgacattctctggagcgccactttctatcatagagaagagcagtgtgttagttgcaaaaccaggagtgtatgaagaagtgttatcgtttatatgagagcaacaaaaaaagtaagaggctgtgtataagcttcttactttttagcgttattgtgatttgcgcatttttctttttgttacaaaaccgtatccaactgtaacaaatgtgccgataatgcaaataataataccgattggactattttcagcaatcataatgccgataccgattaagaaaataacaccgataattgcagttaataaaaagcgatattgaatgtgttccatttcttcaccctccaatctcattttactttcacaaaagtaagaatacaactatattttcattcttgcttttattttaattgctattgtatccccttcgctcttataatagagaaggattaaaaagacattaggagttggacatgttgaaaaaacgacaagatttacgtaatatagcaattattgcccacgttgaccatggtaaaacaacacttgttgaccagttattacgtcaagcggggactttccgtgcgaacgaacacgttgaagaacgcgcaatggattcaaatgatctagaaagagaacgcggtattacaattttagcgaaaaatacagcgattcactatgaagataaaagaattaacattttagatacacctggtcacgctgacttcggtggagaagtagaacgtatcatgaaaatggttgatggtgttttacttgttgttgatgcatatgaaggttgtatgccacaaacacgatttgttttaaagaaagctcttgagcaaaacttaactccaatcgtagttgtaaacaaaattgaccgtgacttcgctcgtccagatgaagtagttgatgaagtaatcgacttattcattgagcttggtgcaaacgaagatcaattagagttcccagttgtatttgcatcagcaatgaacggaacagcaagcttagattcaaacccagcaaatcaagaagagaatatgaaatcattattcgatacaattatcgaacatattccagcaccaattgataacagcgaagagccacttcaattccaagtagcacttcttgattacaacgactacgttggacgtattggagttggtcgcgtattccgcggtacaatgaaggttggacaacaagttgctttaatgaaagtagacggaagtgtgaagcaattccgcgtaacgaaattattcggttacatgggattaaaacgtcaagaaattgaagaagcaaaagcaggggacttagtagccgtttctggtatggaagacattaacgtaggtgaaacagtatgtccagttgaacatcaagatgcgttaccattattacgtattgatgagccaacactacaaatgacgttccttgtaaataacagcccatttgcaggtcgtgaaggtaaatacattacatctcgtaaaattgaagagcgtcttcgttcacaattagaaacagatgtaagtttacgtgtagataatacagattctcctgatgcgtggatcgtatctggacgtggggaactacatttatctatcttaattgaaaacatgcgtcgtgaaggttatgaattacaagtatctaagccagaagtaatcattaaagaagttgatggcgtaagatgtgagcctgtagagcgtgtacaaatcgatgtacctgaagaatacactggttctattatggaatctatgggtgcacgtaaaggtgaaatgttagatatggtgaataacggaaacggtcaagttcgccttactttcatggttccagcacgtggtttaattggttacacaacagaattcttaacattaactcgtggttacggtattttaaaccatacattcgattgctaccaaccagtacacgctggacaagttggtggacgtcgtcaaggtgttctagtttcacttgaaacaggaaaagcatcacaatacggtattatgcaagttgaagaccgtggtgtaatcttcgttgaaccaggtacagaagtatatgctggtatgattgtaggagaacacactcgtgagaatgacttaacagttaacgttgtgaaaatgaaacaacaaactaacattcgttctgcgacgaaagatcaaacttcaacaatgaagaaaccacgcctaatgactttagaagaatcattagagtacttaaacgatgacgagttctgtgaagtaactccagaatcaattcgtctacgtaaaaagattcttgataagagtgagcgcgaaagagctgctaagaaaaagaaatctgtcgaagcgtaaaaataaaaaaacaacgccctttataaagggcgttgtttttttattttgtttattttttagaatatttactcatttttgtggacagtattttttttgcgagttactcttgtattaagtgtataaagaaaattgcattttactgctaggggggaagagtgtgttagaaaggatgtctttttttgcaaaattgtgtaaggtagatgaaaatccagagttaggaatgtggttactttatgggacgattattatattaagtgctctcgtttataatttagggtttgctagaaagttgtctgtactaaaaaatattgtgatatacatatcattagcaattggatgcacagtattaaccttttttgctgtgtttttacctgttggagaaggacttgttgtagcggcaattgtacttggaatttatagattgcgtttgcgtcaagcgaaacaacaaaaagcaggataaggaaggggagttttcatgcgttcagtacaagatgcactatataattggttaacaattaaaacagttgcggaagcacgcccagatgatagtgctgcaaaagaaacatatttgttatttcaaaatatgatatatgaagaacataaattaagaaatgttgaagtcgaaaagaacgaggaaatgtatttaattacatatgaaatgaatggagaacggaaatctgcaaggtttccgttagaagccattgattgttttttggatcagatgaatcgtgaaccagaaaaatataaataagtccttatctatatgagtaaggacttatttacattttaccaatcatcttcgatttttttatcacgatataatcggaaattaccacttgcatgacgttccattgtacgctctgcaattcgttccgaacattccatgcacatatatgtatgaatagggcgattacgcagtttttttgccataggattttcatcatctaacatatcttttttatcacaaatcatacatttgactctcatttcgtcacctcaatacgaattctatcagtataagtatatcatggaagtataatgtttttgaataatagtgggaaaaaataatattttcgcaattcaaaaaataagttatgataaggatataccaagtatgtttggaggtgaaaatatggcgaatgtagtagagcctaccttaacagaggatttagtacaaacgttgcgtaaagagtgtattgttatgatagcaacggcagatttcgaaaagcaagttcctaacgtaagtgctatttcttgggtgtatgcagtgagtaaaactagtattcgatttgcagtagatcaacgttcacgtattgtggaaaatatacggcataatacaggtgtggtattgactataatggcgaatgaatccgtattttctataagtggtgcaggtgaaattttgacagatagaatggaaggtatttctctaaaattaactgtaatagaagtaaatgtgcaagaagtgcgtgatgttatgttttatggagcgaaacttgcaattgaaccaacatatgaaaaaacatatgatcttcgggcagcgaaaaagctggataatgaagtgttagtagggataagagaattataaagatgctaaataggaaattcgtttattcacttttgtaatcggttattgtgatttaacgttaataattataataaaaagtaatatattgaatagaaatgaataaagaataaataaaaggtttaatgactatgattttcgattctacctcgtttacacggtacatataattataacaatggttcgtccatattgtatggatgaaacccttgttctacaaatttaaaagtggagtcagggggtaacaggttggataaaatttatgtgttagatacgaatgtacttttgcaggatcctttatctattttttcatttgaaaccaatgaagtagtgattccagcagttgtattagaagaggttgattcgaaaaaacgttatatggatgaagtaggacgaaacgctcgttatgtatctaagttaatagataaatttcgtgaaataggaaagctgcatgaaagtatcccgctagaaaacggcggaacatttcgtattgaattgaaccatcgttcattcgtgcaactacaagatatttttgtagaaaaaacaaatgataatcgaattttagctgtagcaaaaaatctatctttagaagaacaggaaaaagaggacgggaagtctgttattttggtaagtaaagatgtgctcgtaagggtaaaagctgatgcaattggtttgaaggctgaagattatttaagtgatcgcgtaattgaagtagaaaatatatattctggctttttagaaggatatatatcaaaagaacaattggattatttttatgagaaaggtgaattgcctctatctgaaattgcgaatcatcctttttacccaaatcagtttgtagtgatgaaagatgcattagggggctctagttctgctcttggcattgtggatcacttaggtaagaaggtaaagaaacttatttttcacaatgaacaagtgtgggggatacgaccacgaaatgtgcagcaaattatgggattagaattgttgcttcgtgaagatattccgcttgtaacgttaacggggaaagccggcacaggaaaaacgttacttgcgttagcttcgggacttatgcaaacagaagacttagggttatataaaaaattacttgtggcaagaccaattgttccagtcggaaaagatatcggttatttaccaggagaaaaagaagaaaagttaagaccatggatgcagccaatttttgataacctagagtatttatttaatacgaaaaagccaggagagttagatgctattttagctggaatgggttcgattgaagtagaagcccttacttatatacgcgggagaagtattccagatcagttcattatcattgacgaagcacaaaatttaacaaagcatgaagtgaaaacgatattaactagggtaggggaaaagagtaagattgtattgatgggagatcctcagcaaattgatcacccatatttagatgaatataataatggcttaacatatgttgtagagaagtttaaagaacagcgtattagtggtcatgtgaagtttgttaaaggggagcgatctaatttagctcaactagcagcagatttattgtaaaaaggagtgagcttaagctcactccttttctttaaataattgtaaatttacggatgttacggattggattttgttgattagatccatcattgaaatagagatgaacaggcccgtcttcttttaatggttttccttcttttgaaaagcctagtatagcatttttgacagtttctaatggaagtgtcattgtatgatctaccgtttcaatttcaacttgcctagcgtcctctaaaatttcagcgttagcaagaaatggatgaaatggtataccaaatgttccagtaatcagctgttcttttttatatttcttcacactttgttgtattggaggaaaagcggcaccatcacggatttcgcgatcccaatgttctgaagtgttttttaaataagtttctagttcagacgtgttttctctagtttcatcaaagtaagttgtcaaatctacttttcgatcatcaaagatccaaacagttggatcaatagtgattggaaaacgtacttttccgttaataaataaaatttcgctcattgttgttcccccatttgtgttatactcccacttttcagtataatagtattagacactgttgtcacaaaaaatgtttctattgcaatttattaaaactatcgctaatattaatagataggatagaggagagtaggacggaaacggagggaatcaatttggcgtctgagacagtagcaaatcatcaggaaaaggcactagcccttctacaagcggatgcagagaagattttaagacttattaaggtgcaaatggaccatcttacaatgccgcaatgtccattatatgaagaagtgttagacacacaaatgtttggactatcccgcgaggtcgattttgcggttcgccttggtcttattgcagaagaacaagggaaagcaatgttaggtgagctcgaacgtgagttatctgcacttcatgaagcatttacaaacaaacaacaataacgggttcaaataagggggctcaaactaaattagtttgagctttttatttgtataataaagcaggaagaatcaatgtacatatggaatacaacaataattaaattgaaacagaaagaggaaatgaaatgaaaaaagtatggaaatcaatggattattcattattacttcctcttgttatcttatgtgtgctgggagtaataatggtatatagttctagttccattgttgcgatttcgaggcataactggccggcaaattacttttttaaaaaacaattaataactttagctattggaacggtattgttagtaattgtagcttcgttaccttataagttttggagaaaacgaataattttatcggcgatggggctagggagtattgctttactagcagcagccttgatttttggtaaggaaataaatggtgcaaaaggttggatattaggtatacagcccgctgaatttgttaaattatcgattattattatattagctcgcttttttgcaaggagacaagaaacaaatacacctgtttttaaagggtcgggacttacacttggttttgttggaatggcaatgtttttaattttaaagcaaaatgatttaggtaccgatttgttaattgcaggaacagtagggattatgtttctttgttcaggagtaaggattaatttatggattaaacgaattgttttaacttctatagtatggattccagctctatattttttggctaattataaattaagtggatatcaaaaggcacgtttttcagtttttcttgatccattcaatgatcctcagaatgatggattccaattagtaaattcttttattggaattgcttcaggagggctaaatggtcgaggattaggaaatagtgtgcaaaaatatggttatttaccagaacctcaaacagattttattatggctattatatctgaagaattaggttttattggtgtagctattattttaatttgcttgctacttattattattcgttcattcaggattgctcaaaaatgtaacgatccttttggaagtttaattgcaatcggaattgcaagtttaataggagtacaaacttttgttaatgttggtggtatgtctggattaataccgcttactggagtgcctttaccgtttattagttatggtggaagttctttaatagctaatctacttgcaatgggaatactacttaatattgctagtcacgtgaaacgacaagagaaacaacagaatggtgtaatgaaagaaagagaacaaaatggaccacatcttgtagttgtaaaataaaaacacattgtgctttagagcatgatgtgttttttatttttaagtagttttaaatatgatgtactaatttctctttcagttaaaaggtatatcacattaagttaaatgtgatatacaattaagttgttagaaaaggaagaggtatgctatactatttttgtgaaacaaattgcacagaaaacttatcatttgttagaaaataaggtatgatggataaaaataaagtgaagctttctaagtataatataatgtggaaagtgaagaacttcacgctttttaaggtgtgtatatattttatctctagagtggtaggaaagtagagggggaaaatcatgacaaagctgcaacgtattcaaaaagtattggtagctaaccgtggagagattgcaattcgtgtgtttcgagcttgttcggaacttggattaaaaacagttgcaatctattctaaagaggatagtggttcttatcatcgctataaagccgatgagtcctatttagttggggaaggaaaaaaaccaattgatgcttatctagatattgaaggcattattgagattgcaaaaagtaatcatgtagatgcaatccaccctggatatggtttcttgtcagaaaatattcaattcgctaaacgttgtgaagaagaaggaattatctttatcggtccgaaaagtaagcatttagatatgtttggagataaagtgaaagcaagaacacaagcgcagctagcacaaattccagttatacctggtagtgatggtccagtaaattcattagaagaagtcgaaaaatttgctgaaaagtatgattacccgattattattaaagcatcccttgggggtggcggtcgtggtatgcgtattgtgcgtactagtgaggaattaggagaatcatataatcgagcgaaatcagaagcgaaagcagcttttggtaatgatgaagtttacgtcgaaaaattcgttgaaaaacctaaacatatagaagtacaaattttagcagatgaagaaggcaatgttgttcatttatacgagcgtgactgttctgtacaacgtcgtcatcaaaaagttgtagaaattgcaccgagtgtatcactttcagatgatctgcgtcagcgtatttgtgatgctgctgtgaagttaacgaaaaatgtaaactatttaaatgcaggaacagtagaattccttgtaaaagatgatgagttttactttattgaagtaaatccacgtgttcaagtagaacatacgattacagaaatgattacgggagtagatattgttcaatcacaaattttaatagcggatggacattcattacatagcaaaatggtaggtgttccgaagcaagaggaagtagttgtacatggatttgcaattcaatctcgtgtaacaactgaagatccgctaaataattttatgccggatacaggaaaaattatggcgtatcgatcaggtggtggttttggtgtgcgtcttgatacaggaaatagcttccaaggtgcagttattacaccgtactacgattctttacttgtaaaagttacaacttgggcacttacttttgagcaagctgctgcaaaaatggaacgtaacttaaaagaattccgtattcgtggtattaaaacaaatattccattcctagagaatgtagtaaagcataaaaacttcttatcaggagaatatgatacttcatttatcgatgcgtcacctgaattgttcttgttcccgaaacgtaaagaccgtggaacgaaaatgttaaattacattggtacagtaacagtaaatggtttcccaggagtagggaaaaaagaaaaaccaatattcccagatgctcgtattccatgtttaaaacattcagagccaatccaaaatggaacgaaacaaattttggacgagcgtggagcggacggattagtaaaatgggtacaggatcaaaaacgtgtacttttaacggatacaacattccgtgatgcacaccagtcattacttgcaactcgtattcgtacaaaagatttacatcaaattgcggagccaacagcgagaatgttaccgaacctattctcagcggaaatgtggggcggtgcaacgtttgatgttgcgtatcgtttcttaaaagaagatccatgggaacgattactagatcttcgtgaaaaaatgccgaacgtgttattccaaatgttacttcgttcttcaaacgcagttggatacaaaaactatccagataatttaattcaaaaatttgtggaatgttctgctcaagcaggcattgatgtattccgtatttttgatagtttaaactgggtggaaggcatgagagttgcaattgacgctgtacgagacactggtaaaattgcagaagcaacaatgtgctacacaggggatattcatgatccactgcgtagtaaatatgatttaaattattataaaaatttagcaaaagagttagaagcatcaggagctcacattttaggtattaaagatatggcgggcttactaaaaccaaatgcagcatatgatttagtttctgcattaaaagagacagtgtcgattccaattcatctgcacacgcacgatacgagtggaaatggtatattaacgtatacgaaggcaattgaagcaggtgttgatatcgtcgatgtagcagtgagttctatggctggtcaaacgtcacaaccaagtgcgaacacgctatactatgcgttaggcggaaacgaaagacaaccagatgttaatatagattctttagaaaaactatctcactattgggaagatgtacgcaaatactatgcaccgtttgaaagtggtatgaatgcgcctcatacagaggtatatatgcatgaaatgccgggtgggcagtatagtaatcttcagcaacaagcgaaggcggttggtttaggagatcgcttcgatgaagtgaaagtaatgtaccgccgtgtgaatgacatgtttggagatattgtaaaagtaacaccatcatcaaaagttgttggtgatatggcattatttatggttcaaaaccatctaacagaacaagatgttttagagcgtggacatgcgatggacttcccagggtctgttgttgaaatgttctctggtgatttaggtcaaccgtacggtggtttcccgaaagaattacaaaagattattttaaaagggaaagagccattaacagtaagaccaggtgaattactagagccagtagatttcgaagcgttaaaagaagaattattccataaacttggacgcgaagtaacgatttttgatgtagtagcatatgctttatatccaaaagtatttatggattatgaaaaagttgctgagctttatggaaatgtatctgtacttgatacaccgacgttcttctatggtatgagactaggtgaagaaattgatgtagaaattgaacagggtaaaacattgatggttaaactagtatcaattggagaacctcagtcggatggaaaccgtgttctttacttggaatttaacggtcaaccacgtgaaattatcgtgaaagacgagagtgtaaaagcaacagttgcacaacgtgtgaaaggaaaccgtgagaatccaaatcatattagtgcaacgatgccaggaacggtaattaaagtagttgtaaaagaaggcgacgaagtgaaaaaaggcgattctatggcaattacagaagcgatgaaaatggaaacgacagttcaagcgccgttcaatggtaaagtgaagaaagtatatgttaacgatggtgatgcgattcaaacgggtgatttacttattgaattagatcactaaaataagaaaagagctgtgtaaatacagctcttttcttattgcaaaaaatcccttgccgaattggcaagggattttagttttaaattattttgtttgtttagaagttgattcggcttctttggcattcactttacttcttgttcccagcataactaaatagcatagtacggcaaacaagcaagaaatgaatagagaatgtaacaatgccattgctaaactagcgtttgtaaatacaactaaaactcctactacagcttgaagtgtaacaaggataaatgaaataatccatccccaatatactacagattgctgcttgtaatggcgaatagcgagaatcatcgcgtatagtatccaagcgaaaattaacatcgctgcaactctatggcccatttgaacccattcatgtagttgagttggcataggtctgtttttgctacataaaggaaagtctggacaggctaagctagctcgttcgtgacgtactaaagcacctgtgtagacgacgatataactgtaaattgttacaccataaatatgaaatttcatttttttgtccataataagtgaacgtgcatcaaatttttggtcaatttcaaagataagacacgttaataaaatgacagaagcaaatgaaattaaggaaataccgaaatggatagcaagtacagctggcatttgtccccaaacaactgctgctgctcccattaatgcttgtgcaactaaaaatacgaaggataaaattgctaacgtttttgtttcacgcacatgtttataatatttccaggacaaaatacaaagtagagtgacaagaattccagctgatcctgatgttaatcggtggctaagttcaataatagtttccattgataaattagatggaacaaattcaccgttacaaagtggccatgatttaccacaaccttgaccagaacctgtttttgtaactaaagcgcctcctaataaaactattaataaatcaaggcttgtaatgactgctaaccatttaataaagcgttgcaatctctttcaccatctttctgctatgaagttattgcgaaatattttcattccattatgtatagaataaaacgcgctagttcctatgatatataaaaaataataaaatagcaaagaaatggagggggaaggaaagggagagaaaataggtgtaaaaacagggttcgcaaggaaaattttgggtgaaaaataggctattttgaaaagaaatggggagaatacgtgttaaataggacaaaatagtttattatagaaggtaacatcatgttatgataaggacaagtcagaatgaagttttttatattcgacacaaaaagttcatgttttcttcacaaaatgttcgggaaatatgatttaatatattggagtatgggcgtagattagtagtagaatgggttaacaatgtttctactgtaataatattgctatatagaagcgaattatttcatttgaaataggcgcaaaaagaaagatgaaagttttaagagggggttagagtgatgaaccatgcaacaagtgagctgcatgatgagtccgctgttacaagtgtaccggaaacaactcggttacaagatttaaaagcactcgttaaaatggggattgtaaactcaaatacacttactgtatttacaggattttggttggcattacactttaatggattaagtgtaatggacaatctggataagttattctttacaatcgttggttcaggattaattatggcaggggtatgttgtttaaacaactacattgatcgagacatcgatccattaatggaaagaacaaagacccgtccaacggttactggaaagtataaaccaggatttgcacttacatttggactagtcatattacttcttggttttgtatttttattattaacaacaccaatggcagtcttaatgggatttattggtgctttcacatatgttgttctatatagtttatggacaaagagaaagtatacactaaatactgttgtaggtagtatatctggtgcagttcctcctttaattggatgggcagcaatcgatccatctttaggccatccaattgcttggatgttatttttaattatgtttatttggcaaatcccacatttccttgcattagcaatgaaacgtgttgatgaatatcgaaatgcaggaattccaatgcttcctgtagttcatggatttgaaattacgaaacgccaaattatgatttggacagtatgtttattaccactaccattttatatgagtggactagggataacatttatggtaattgcaacactgcttaacatcggatggatcgttttaggattttatggcttccgtaagaaagatgacatcaaatggtccgtgcaaatgtttgtttattccctaaattatttaacaatcttatttgtatcaatgattgtagttacattcttctaagacaacgacataattggatttctttacgttgagatttactttacttaactataaagtacaatctaattcacaaggaaagtgggggttgtttgtatgaagaaacagtggcgactgctttcgttcgtttcactgctggctttactgttagggggatgcggtaaagcctttcaatctactttaattccgcaaggagaagtagcaaaaatgcaatatgatttacttctactggcgagtgcaatcatggtaggagtagtactagtagttactattattttcttatatgtaattgtgcgtttccgacaaaagaaaggtcaggaagattatattccagagcaagttgaagggaatcacaagctagaaattatatggacagttattccgattattcttttactaatcttagctgttccaacagttacatatacattcaaacttgctgatgtaagtgcgatggagaaaaagaatattgataaagatactatcgttgttgatgtaacagcgaatctttattggtgggaattttcttataaatcagaaaagatagtaacttcgcaagatttggtcatccccacaggtaagaaagtgtatttaaatttgaagggtgccgatattaaacactcattttgggttccatctttagcagggaaaatggatacaaatacagacaatgtgaacaaaatgtggttaaaggcagataaatcgggcacttataatggtttttgtacagaattttgcggcccatcacattctttaatgcaatttaaagtgaaagctttagatgaaagcgagtacaaaaaatggcttgctgatatgaagaagattgatgggaagaaagaagtagcttcaacaaaggcgcaagagggccaagaaatatttaataaaagctgtattggttgtcacgcagttggatctaatgatagtagaccaccttccgctcgtatcgcaccaaacttagcaaactttgcggatcgcgatatggttgccggtattgccgaaaacaatgaagaaaacttaaaaaaatggctgaaagatcctgaaaatatgaagccaggaaacaaaatgactggcaaatatggcaacttaacggatgatcaaattgatgcattaaatgcatacttacaaacgttaaaagttgaaaagtaaagagggactattcgcgaaggggaggttgaaaacgtgagttctgtagcaaaaaaacaggggatgggtgctgtcatatgggattatttaacgacagtagaccataaaaagattgccattctctatttaattgcaggtggattgttttttgtaataggcggaatagaagctctatttattcgccttcaattagcgattcctaacaacgcttttcttgttggggatgcttataatcaagtattaacgatgcacggtacaacaatgattttcctcgcagctatgccactcgtgtttgcatttatgaacgccgctgtaccacttcaaattggtgcacgtgatgtagcgttcccgtttttgaattcactcggattttggttatttttctttggtggagtatttttaaatttaagttggtttttaggtggagcacctgatgcaggatggacatcttatgcatctttagctttagcctctaaaggtcatggtgttgatttctatgtactcggcttgcaaatctcaggtattggtacattaattggaggaattaacttccttgtaaccattattaatatgcgcgctccaggaatgacgtatatgcgtatgccgatgtttacatggacaacatttgtaacatcttcgcttatattattcgcttttccgccgttaactgtaggattaggacttttaatgttagatcgtttatttggaacaagtttctttaatccggcattgggcgggaatacaattatatgggagcatttattctggattttcggtcatccagaagtatacattcttatactcccagctttcggaatattctcagaaatcttcgcaacattttcgaaaaaacgattgtttggttattcatcgatggtgtttgcgactgtattaattggatttttaggatttatggtatgggcgcaccatatgtttactgttggacttggtccagttgctaatgctattttctcagttgcaacaatggcgattgcggttccgactggtatcaaaatattcaactggctctttacaatgtggggcggaagtattcgttttacgacaccaatgatgtgggcagtagctttcattccatcattcgtaatgggtggagttacaggggttatgctagcatctgcaccagctgattatcaatttcatgataactatttcgtagtagcacattttcattatgtaatcgttggcggtgttgtatttggtttacttgcaggagctcattattattggccactgatgtttaataaagtattaaatgaaacattaggaaagataacgttttggctattctttatcggcttccatttaactttctttattcagcatttccttggcttgattggtatgccacgccgttactacacatatcttgaagggcaagggttggaaatggggaatatgattagttccatcggagcggtgtttatggctcttggaacgattgttcttctattcaatgtaattaaaacaacagtatcaaaagaaaaagctggtcgtgatccgtgggatgcacgtacattagaatggacaatgccagcaccgacaccagaatataactttaaacaattaccatttgttcgcggattagatccgttttggattgaaaaacgtgaaggtaataaagaaatgacagcagcggaaccagttggtgatattcatatgccaaatccttcgttttcaccatttgtcatttctttcggattgtttatagcggcatttggtgcgatgtatatgcagggcggaaaagataagttctggttattagtagcaattattggtttaatcattacatttggcacaatgttcctacgttcagtaattgatgatcatgggtatcatattcataaagaagatttagaggataaggggggcaaggcataatgcatgtagatgaaaaattaacgaatgaaacatttccagcagagcctgaaaaagcaacccttgaagggaaaaataagtttgtcggtttttggctatttcttggaggcgaaacagtgttgttcgcttccttattcggaacatatttagcgttaaagaattctacaaatggtggaccaacatctcaagagatgttccaaatgccactcgttttcattatgacgatgcttttattaacgagtagcttaacgagtgtatatgcgatgtatcacatgaaaaactttaactttaagaaaatgcagctttggttactagtaacagtattgctaggtttagggtttttaggatttgagatatatgagttttatcattatacacatgaatttaagcatactatgagaagtagtgcctttggctctgcgttttatgctcttgttggtacacatggactccacgtattgtttgggttatgttggattttaacattaatctttagaaatgcgaagagaggtctaaatttatacaatgcaccgaagttttatgttgcatcgatttattggcactttattgacgtagtttgggtgtttattttcactgtagtatatttaatgggaatggtgggataaacaatggcgataaagcaaacgaataatcctaaagttgatcttgtttatcggaagagaaaaagtgcggaggaaatgaggcatcaagttattacgtttgcattaatgatttttttaacattagttgcatttgtagcagtagcgtatccaaaaacttttagtccgattttctctgtaccgtttattttactattagcagtggtacaagtaatttttcaattgtattattttatgcatatgagtcataaaggacatgaagcagcaagtttctttctttactctggtctgctaatagggttaattacaattttagcttttatgacaattgtgtggatttgaaaagtgaaaaataagggagcttgtgttgtcacagctccctcttcatattatgagataaccttacgaaggcaggtgtgaaaatgagtaacttgtggatatttggttttcaggctttatggagtccaatctttttattatttatgctttcgattcttattgggtacttcttaattattggaccatatagaatgcgatttgaaaatgcgacgaaggtaagtaagaagcaaattttttattttacgactggtattgttcttttatattttgtaaagggagggcctattgatttaattggccatattatatttagtgctcatatgtttgaaatggcagtcatgtatattgcagttccaccgttactgttgcttggtataccaatttggttatatcgttacattacttcttttaagttcgttcaaattatattaaaggcatttgctaaaccacttattgcgttgtttgtatttaacggcctgttttctttttatcatttaccagttgtttttgatacagtaaaacaaagtcaaatagctcatcctatttgtctcgctatattgttttttacagcaatcatgatgtggtggccgatgttaaatccattaccagaatatcaaacgttaagtgatataaagaaacttggttatatgtttgctaacggcatattattaacgcctgcatgtgcgttaatcatttttgcgacagccccgttatttgcaacgtatacggatccggctgcttggatgaaagcgatggaactatgtgtaccagcgggcactttatcagatttaaatataacgggaccagaatttttgcactggatgccagtcgtacaagatcagcaaactggtggtatcataatgaaaattgtccaggaaatagtgtacggtacaattataggctatgtattctttagatgggcacgtagagaacgtgaaaaggataaggagcagttgcaacaattgccgccgtatttacagattaagtaaaaaagtgtatgggattccatgcgctttttcttttttagctaccttaaaaagattgaattttctaactttttatgttaagttagtgtaggcgtgtactaaaagtggagataaaatttactactagctttcatgcgtaataattccatatgtagtgcaagttttttagagagttacaaatatatattgttatctttaataaacacgaactattttaagggggagtttaaatgggtagtagtggaagtatggtaaagccgattagtggttttttgacagcactaattcaatatccagtaccagtagtagaatcgcgtgcagacattgataaacaaattcaacaaatcataaaaacaattcattcgaccaaatcaggttaccctggtttagaattgatagtatttcctgaatatagtacacaagggctcaatacaaaaaaatggactacagaagaatttttatgcacagtgcctgggccagaaacagacttatttgctgaggcatgtaaagaatctaaagtatatggtgttttttcaataatggagaaaaatcctgatggtggagagccatataatacagcagttattattgatccacaaggtgaaatgattttgaagtatcgtaagctaaatccttgggtgccagtcgagccttggaaagctggagatttaggcttacctgtttgtgatggacctggaggaagtaaattagctgtttgtatttgtcatgatggcatgttccctgaagtagctcgtgaagcggcctataaaggtgcaaatgtcttaattcgtatttctggatatagtacacaagttagtgaacaatggatgctaacgaatcgttcaaatgcatggcaaaatttaatgtatacattgtcggtaaacttagcgggttatgatggtgtattttattactttggtgaaggacaagtatgtaattttgatgggactactttagtacagggtcatcgaaatccttgggagattgttactgctgaagtatatccagaactagcagatcaggctagattaggatggggattggaaaataatatatataatttaggttcaagaggatatgtagcaactcctggtggggtgaaagaaaatccatatacgtttgtaaaagatttagctgaaggtaaatataaggtcccctgggaagatgagattaaagtaaaagatggatctatttatggatatccagtaaaaaaaacgattcattcttagggaagggaaataaaacaagcgcatcatattgatgcgcttgtttttgttaatcaataatttgaaattcttttaactctttttcgacattttgtaggagttgttcgcttttttgaagtacattcgttgggaaagtctcatcatcaccatattcaacgccgtgaggataataatgttttcctaataagggggggagtagttttacttcagcgtgtctactgccaatgtcaccttcaacagcaactccttgcactcgtaaataataaacatcctttaatatttcaaatttataatcgtatgtaactcgttcataatcccactgtccggcaagtacgaagtggttgttttccatgatttcagttaaaagagttaattcaacgacggctccattaaatttcgtatttgtaaattgcatataatacctccttttttaatgttacaccattatttttataatagtatgaataataagaaagtgcaattcatattgagagaaaagggataatccagacttttttcacaaaaatatgatatagtgaaaagagtacggtacacacaaaaagaaagaaaaggatttgtgtatatctcaattttatgttttgttcaggaggtatatcgtttgaagaaattattgcgtatcgtaatgattacatttttaattttagctgttgatttatacgggaaattactcgtttcacaatatatattaaccccatctcaatcaaagcaagaaaataaaattgtgaaaaagaaaaagcaaattaaggaagactcctcagacactgttttaaatatgattggtgaagactctgaaaacctattagcgaagtggggagaaccctctcgaatagagccatctgcatacggatatgaatggtgggtatacaaccaggatttaactcagtatgttcaatttggagtttctgaacgtaaagttgtaacggcatacgcagctggtgaacaagttaaggttccaccttattatataaatgaaaaatatgaagaagtatataaaaaaagtccgctttcgcatgaaatttcattaaaaagagggaaaaatagttatcaatttgagctatctgataccgaagtcatggaacaaccgttaatacctgtagaagatggatgggcgcaattgtattttgatcaatttacacatgagcttgttggtgttcgttatatggatgatgaaactttattacgccaaagaccgtatcagctcgtttattcaggtgaattaatagcagaacaaccattgactccagaaaaaataaaacaagtagaaaatgggaatatgcaacaaatttttgatttaacaaatatcattcgaagtcgtcataaattaccattattaacatgggatcaggaaacagcagatgttgctgttggtcacagtaaagatatgaaagacaataattatttttctcatgactcacctacattaggtacactaggagatcgtttgcagcgcgggaaagtaggatttcaacttgctggtgagaacatagcggcgcaacatagtgatggaattgcggcagtgcaaggttggttaaatagtgaggggcatagaaagaatttattaaatgaacaatttacaggattaggtgttggtgtatacgataaattttatacacaaaactttattcgaaaataaagcgaaactgtaagcggtggggtgttacatcacctaattagttacttcgtattcactgaattgtaggtgggaatctgaccgtatgcaaatagcagaaaaaaaggtgcatgaatcgtctaaaaataggcgaaccatgcgccttttttttcttactatatagtagatatacatggagaggtgaggattatgccaacaacaaaaggaccgttacatccatcggttcaacagtttaaagaatttgtaaaccatcaccctaaaatggttcatgaggttagaagtggtcacaaaacatggcaacaattttatgaagaatggtacttacttggtgaagaagatccaatatgggcaacttatagaccggatggagcgcctgcgttttcttcggtaaaagaaaataaaaaagaaaaagataatcgaactgaagaggaaaaaactgctgatgtgatggggcaaatgctttctttttttaaaaagttggacgtggaacaaatgcagaaccatttagccaatgtgacgagtgcaattgggagcgtgcaacaagttattcagcaatttcaaggtaaccgtacgcagcaagagcaaagtacttcagaaaataacccgtttttctttcaaaaggattagggggaaagatgatgagagcagaaattatggagtttataaaggctgatgaggatttatctcgttatattagagagcaaccgtactggtatagaaaattaacacgaaatcctgaagaaaaagaggcttttgagttagcggcgatgcaacatttcaaaaaaacgataccagataaagtggaaaagtttcaaaatcaattggccgttgcttcgatcatgattgatatgtttcagtatatgaagcaacaaaacgcaacctaattggaagtgaaaaatatgtccgtcatgcagaacttttgttacaatagaagttgattatttaaaaaggagttgcagcatgacggaaatttgtttagtacgacatggacaaactgattggaattttcaagaaattattcaggggcgagaagatattccgcttaatgaagttggtaagaagcaagcgagtcaaagtgcagctgctttacaagaagaaacgtgggatatcattataagtagcccgttaattagagcgcaagaaacggctaatgaaatcgcaacggcagttggattacaatcgattttattagatgagcgatttgttgaacggaattttggagaagcttcagggaagccggttgcggctgttagagagttgattgctgagggtaaagtagaaggtatggagcgagatgaagagattgtagctcgttgctttgctgctttagaagatgttgcgacaactcattttggcaaacgtattattattgttgctcactcacacgcgataaaagcgattttacatgccattgaaccagatgaaattacatttaagacaccattaaaaaatgcgtgtattagttatgtgaaacaaaatagtggaaaatgggatgttcttaaatataatatagcggaacatattaatgtataagtgtgtacggatatagtgtaaaaatagttacgttatatctttcttttgagtaagtcacttcaattagtagttctaatctaaatgtggtatgatggatactcggaggtgtctctcatgattgtagcgacgctagaaagcgtattaatattagataaggcagagcagcttgcaaaagcgattatctgttcagatatagcagaagattatcgtaagtattatagagaattacatgaagatatggaacttcagacgctaattcagcaatttacagcgatgaaagaacggtatgaggaagtacagcgttttggaaaataccatcctgactatactaccgtgtcgatgaaaatgagagaattaaagcgttctgtggacttacatgataaggttgcagcttttaaaagagcagaaactgctttgcagaagttattagatgaagttagtgtagcaatcggttcggaagtgtcttcttccattaaagtgccaacaggaaatccattctttgatgctggtggctgtggtggaggttgtggtactggcggaggttgtggttgtaaaaaaacggggtgatgtaccccgttttttagaagttggaagaaaacgtatacagagtttgtcctgtaatgttataaatttctgattggttttcatagaatataaaatatatgtttttaaaaggagaagatggagaagattatgttcgggcaacgacaaagtatgattgtttatttacattcattgaaacatgccaagattttaaggaaatatggtaacatacattacatatcaaaacgattaaaatatgctgtagtatattgtgatatggaacaaattgagcatatgatgcataagttgaacaaacttccttttgtgaaaaagatagaacagtcgtatcgcccgtatttaaaaacggaatttgaaaattcccgtcctgatcgagcaaaagaatacgattatagctaatagaaaaaatcccctgctaaatttagcgggggatttttcacttgaaataacgtgttatttcatcggaggaatgaaattgttcattcgtaaaataccaattaaatgattaaaaaatagttctttttctgggaaagttgtagatggttttacagtaaaggtagccacttttttcccgagttgttctgccgtttcttcaaataaaatgacacgtttactttttttattttcaaatacaggaatgccttcacgacatatgtataatggttggaaatcaccagtagtagttggttttaatattacaacaagcgaacacacttttttatcgttttttatcgtttcaaattgtaacatatgtgctatacgttcttgatttgttttggcaatttcaagtaattcatataaatcagagtagccttctccaagttctataaagcgttgaatcatatcttttcctcctctttcttttactgtaccatttcactttttaaatgaaaagcacacaaagaaaaaaaaccctgcatagcagggcccttcttatactagcatgtactagtaagaaggcaaagggagaggagaaaccggaggaagaacttatggggaaacgtaagtcttctccgcggttggcaacaacatcgaaggtgatgttgttataattatttatgtccaatctaaatgaagatatacataatgaaattaaattttatgttgggctttttatttttcttttttttattttgtgataggataaaaaagataaagtggaactaatatacatattgggttcatattagtgaatgatgagatgaatacataaaaataacgagaggttatttgaggccgagtttttctatagttaggtgaatgtggtttgttaacggttaccgaagtgggaatggctttctataatcgctcgatagattgaaataaaggtagtgacaacagatgagagtagtttcaggaaaatgtaaaggacacccacttaaagcggttcctggtaatacaacacgtccaacgacagataaagtaaaagaatctatttttaatatgataggtccttattttgatggtggtatcgcccttgatttatttggtggtagtggtggtcttggaattgaggctttgagcagagggatcgataaagcaatttttgttgatcgggatagtaaagcgataaaagtaattcatcaaaatttagaaagttgtagagtacaggaacaagctgaagtatatcgaaatgatgctgaacgtgcagtaaaggcgttaataaaacgtgaaatgtcattcgatcttatattaatagatcctccatataaagagcaaaaaattgtatctttaattagtgtaatggatcaacatggattgctacatagtgatggattaattatggcagagcatggtaatgatgtagttttacctaattcaataggaaggcttgtaaaagtacgagctgagaattatgggattactgcaatatcgatttataagtatgaaggtgaggggacagaatgacaagtatagcgatttcttcaggaagttttgatccaattacccttgggcatctggatattattaaaaggggagcaaaagtatttgatgaggtgtacgtagtcgttttaaacaattcatcaaaaaaaccattcttttcagttgaagagcgattagaactaattcgagaagcgacaaaggatatcccgaatgtaaaggtagattcgcatagtgggctattagtagagtatgcaaaaatgcgtaatgcaaatgcaatattacgtggtttacgagcagtttctgattttgaatatgagatgcaaattacttctatgaatcgaaaattagatgaaaatattgaaacattttttattatgacaaacaaccaatattcatttttaagctcgagtattgtaaaagaagttgcgaggtatggaggaagtgtagtggatcttgtacctcctattgtagagcgtgctttaaaagaaaagtttcaaaccccgttaaagtgaacggggtttttctttatacgtgcgcaaaaataataaaataacatataagtatagacaaaataatgtaaaaattggtccataatgtataaaagatgtccaaatttcatgtagtatagaaggatgctcggataaaaatacaggaatatcttttggcataggtgagaaagaactcactttctcataaaatggtgtccaaaatacaaatgtaaaaataggggcaagaatactttgaataattcgtgcgaaaaaatagggtttaaatcggatatctgtttcagctaatatactagcaacttgtgcctgaatagaaaggccgctaaatgctaaaatgaagcttgttaccatagcttgttgtaagagcggtgtttcatttatttgactaatcatttggcttccgagtgtcatttcgaaaatacctgataatataggtatactaaaatctgtacttagttggaagaatgataaaatatgttgcataataaaagaaagagctgctgtaatgtggaatacagtaatcattttatttaacacagagaataaaataataaatccgccaatcataagtaatgtttgaatagaagaaacaatggcatccccaagtaatttaccaattggtcttttttcttgtaagcgtgtctcgtgaagaattaaaaaagggttttgaaagcgacgtttttttgtagtgtgtgtattatttttgtaagcggtattatcgccgtaaaaacgcataattaatccgacagcaaagttactgaaataatgggcagcggctaatataattcctaatttcggattattaaaaaagccgatagacacagcaccgaaaataaaaagtggattggaagaatttgtgaaagaaacgaggcgctccgcttcaatctgagttaaaagattgctttttcgtagtctagcgcttaatttggcgcctgcagggaaaccagaagccattcccatcgcccaaacaaatccgcctatccctggaacgcgaaaaagtgggcgcatgagtggttctaatataacgccaataaattttacaacaccgatactaattagaagttccgcaatgatgaaaaacggtagtagtgaagggaatacaacttcccaccatatatttaacccgcgaatagaagcttgcaaagcggcttgggggtggagtacaagagaaaaggttaaaaatagcgttgatatggtaaggaaagcggttttccatttttcatacatgtaagtaaatccccctttgtcccaaaaaacgttcatttcagtatacgtggatacgtagtgaatttagaccataagtatgaaaaaggaatgaaaaaaattaaagggtgagaaaaatgaaagaaccaaagattggtttagcgcttgggtctggaggagcgaaagggtttgctcatattggtgtaataaaggttttaagggaagcgggtatccctattcacatgattgcaggaagtagtatgggggcgctaataggtacgttttatgcggcaagtagtaacgttgaaagattgtataaattggcatctgtttttaagcggaagtattatttagatttcacggtaccgaaaatgggatttattgctggaaaacgtgtcaaagatatgattaaaatgtttacatataataaaaatttagaagagttagatatcccgacggctgttgtggctactgacatattgaagggggaaaaagtggtttttacaagtgggccagttgcagatgcggtgagggctagcatatctgttcctggagtgtttgtaccagaaaaaatagatggaagattattagtggatggtggagtcattgatcgcatcccagtatcggttgtgaaagagttaggggccgatattgttatcgctgttgatgtatctccaattaaggtgaatggcgatgttacgtccatttatgacgtaatcatacaaagtattgaaattatgcagcatgagcttgtaatgaatcggcaaattgcatcggatttaatgatgcgaccagctgtagagcaatttagttcacgtgcttttacaaacattgaagacattattcgagttggagaagtagaagcagaaaaacatgtttcaaatatttatttattaattgagcagtggaaggagaaacataatgtttaagcgttttcggtttatatatgcaatcttaataggggttatattggcgatgttacttgtttacgtacgtttaccgtattatataacaaaaccaggaatggctgccaaattagagccttatgttcaagttgagggtggaacgaaagaatctggtgattttatgcttgttacggtttcaatgggaccagcaaatgtggtgaatttaatagcggcacagtttaataaatatacacatatttcgaaagcggaagaaatattgcaaaaaggtgagagtgatgaagaatatcaatttcgccaaaattatgcgatgaaagattcgcaaaatgcagcaatttataatgcatataaacgtgcaaatcgctcagtatcttttgaaaataaaggtgtattagttgctggtgtggcaaaaggaatgccgtcagaaggaaagcttaagcttggtgatgttattatagctgttgacggaaaaacatttgaaaagacggagcaatttattgaatatatgacagggaaaaaagaaaacgatgctgtaagtattgagtacatgagaaatggaaaacaattgaaagagaatttaaatgtaaagacgattcctaatgggaatgggcgtgtcggcataggtgtttctatcgttacggaaagagaattagtggtcgatccgaaagtgaaaattaattctcatgaaattggtggaccatccgcaggtttaatgttcacattagaaatatataatcaacttgtggaagaagacttaacgaaaggacatgaaatagctggaacaggtacaattaatgaaaaaggagaagtgggcccaattggtggtataaatcaaaaagtggtggctgctagcgatgccggggctgaagtgttctttgcgccaaatgaaaaaggtgcggagaaatcgaactataaagatgcacttgagactgcaaaggatattaaaacaaaaatgaaaattgtaccagtagatacgctggatgatgcgttaacatatttagaaaagatggataaggaaaaaacctctctgaaatagagaggtttttttataggaattttgtagttgtttcatcatagcgaacaggatggtgtgttatatcctgttttaatagttgtgtgcgtaacggttcgtgcatgatggagaaatatacagagtttgcttttttctctatatctaaagcggcatggtcgaatgtttttgtatgagtaaggattggaagttcgatttttttcttgttttttgaaaggtaagtttgtcctttttgtgacatacctagcaggcgaatatatggtgcgtgttgttctatatttgcgctacgtatttcctcttttgttgtgtttgttaaaatgtgtgtacaagctctttgtaatctagtccatgtataacgttttgtttttaatgcttccatgaatgaatagaaggaggaactgttttgtatttttgataaaatacgatgctctaaaccttcttctatttcatatatatgtcgtaagtcccctggagacatcgtcatgagtctatatttaaaaaatgaaaagtattgttcccaattatgtaatatcccgtaattttgtttgtaatttgctaaaagcgaagtggttgcctgtgggagaaaaggttcaattgttgtaaatgatccttcttcgctaaagagttgttttcggatgcttgtcgcgcttgcaatatgttggtcattaaatgtttcatcatgataatgagaggcaaatctttttatagtttgagcttgtatagagctattttgtgacagaattgctttcatatattggaagcctaaaatattatttggttgtgacatatctatgtttttttcagatgttaaaatgtgtgagaaagcatccgatgttgcttttgcataactattaccagcgtccatgaattgttttacaaggtagttaaaagtctcttcttcgtttttttgtacggagatggtattataaaaattttcgatttgtccatcctcactaccgaaacaaatttcagaaacacgtagggcatttaaaatggaaatagcaccatttgcgaaggtttcagccttttgtgttgcaaagacgtatggaagctctacaacaaggtctacgccgtttgctaaggccattttagtgcgataccatttggaaatgagtgcgggctcaccacgctgtaaaaaaggaccactcataacggcaattattatatcggattgtgttaacttttttgtctgttgcacatgataaagatgaccgttatgaaaagggttatattcaacaactataccaccagcttttatggtaatctctcctttcgatgtagcatctttttgaaaaacgtgatactctatatattatttactatgatgacttcattatagtgtaaagaaaaaacattgacaaatataaaatggctagctataattttgtttgttgccttgaggtgatatgatatgaaatggtccatccatcaattgaataaattgagaaataaaggattgacattggatgagatggtagatgtaagtgagctaaaagaggtcgagaaagatattcgtgaaattaatcctgttcatgtaacgggaagagttgattttggctccggtaagtttacgtttcatctacatataactggaagcatggttttaccatgttctcgctctttagtagatgtgacattaccatttgacattaaaacaactgaggtgttccaaacttcacaagaagaatttgaaactgaagctgaaattcattctttagaaggagaagtacttgacttactgcccgtaatcaaggaaaatatacttttggagattccaatgcaaattttcagtgatgatgtttctggtggagcaccgatgcaaggtcaagactggcaagtgatttcggaagaagacaaagaaaagactgttgatccaagattggcaggacttgcaaagttttttgacaaataatcggaagactggttcaggccttcatatgaaaataactatttcttttaaggaggtgggaagaatggctgtaccttttagaagaacttctaaaacagtaaaaagaaagcgtcgtacgcatttcaaattatcagtacctggtatggtagagtgcccaagctgtggtgaagcgaaattagctcaccgtgtatgtaaagcatgcggtacttacaaaggtaaagaagtaatcagcaagtaattgcgggaaaataaacgcagaagatatcttctgcgtttattttttttgtcttaatctttagttgttgtattctatcttttctagtaactgcatatgcttaataaaaaatgcatagggaggactagagagatggcgacaacaagacaagatgcttggactgatgatgaagatttgcttctggcagaagtagtactccggcatattcgagaaggtggaacacaactttctgcctttaaggaagtggggaaaaatttatctcgtacaccagcagcatgtgggtttagatggaattcttacgtaagaaagcaatataaagaacgtattgaggaagcaaagcaacttcgtaaagtagaaaattatgaagtgaaagagacaaaggtgttagaacctacgtcaattacgttgaatgatgttattgatttcttgcaaaattataaagatgaaaactctttaacggtgttgcaacaacaagttgaatcattacaaacagaaagagagcgtcttctggagcgattatcagtatatgaagaagagtatagaacactacttgattatatcgatcaaaaaagaagtgtaatggtagcggaaagaaacaatgctcgctcgaatgagaagttagagaagcttaagaaataaaaaacagctgttatacagctgtttttttatttcttaagccgattcttcgtttgtaaccgcattcaaatttgcttctggatgccaaatataaaaatctccatcagttactgatacggggttgaaatttaatttatcccaaaaaccagctgaatgaatacgtgctatcgttttaataggaaattgcatttgtttcgcatgatttacaagcatttgcccgaatccttgtttttgaaaagttggtaatacttcaagtttataaagttctaggtagggacctgtaatttcgaatggttctccgccgtttcttttcatatatagactcatacgtgcgattagtgatccgccataataaataccgtaaaatggagattcactgtcgttttcaataatgtttgcttgtaattcttccagcatagatagttcctgggctccgcaccctttaaattttttgaattcatctaacgttttataattgatgagcaagcgctcaacttttgggaatcccattacatcacatccttttcttgtctcgttgaatgcagaaaagtaaaaatatttataataatagtataactcatttttttatttttatgaagaagatagtatatttctttttttatttttttgaggatttgctaaactaagagtagaagcgtattaataggtggtacatacatagtgaaaaatgagagtatatttgttgggcagaggacagcggaattatagggcgtgctcaggtgctttaaaaagatataaaggggggaaggcaagggcacttagtgtgaattccttgtgtgaaaatgaaaattggaattgtcggaccaggtgctattggtctattgtatacattttatttacaaaaaaataaccaagatgttacgttgtttacaagaacagctaagcaagctgaagaattaaatgaaacaggtgtaacttgtattagagatggaagatgtgaaacagtatatccatctgttttaccgatagaaagtatggtagcgcaaaatttagattatatatttattgctgtgaagcaatatcatatagatgacgtactaccgtttgtggaaggggcatcatcattaatctttttgcaaaacggaatgtcgcatcttcaaaagatgctgaacatagggagtaaaaatatagctgttggtattgtagaacatggtgcgaaaaaagagggagggcatatcgttcatcatactgggataggggtaacaaaatttggagtggtttgtggtcaatctatacattttaaaaaaatattcaattattttcctgttgcttattttccagttcaaatagaaacggattgggaagagattatgcataaaaaattagtagtaaatgtatgtatcaatccgttgacagcactattgggagttaagaatggtgaattaatcacgaatcgttttttttatcaaatgatggagcaagtgtttcaggaggcagcatttcttattagaggagaaaaagaaatggtatggcaaatggtacgaaatgtgtgtgaaggaacgtctcgtaatacatcttctatgctagcggatgtaagagcgagtagaaagacggaaattaatgcgattgttggatatgtattagaagaagctaagaaacagcaacgaccagttccgacacttcaatttttgttcgatgcaataaaaggtttagaaacaagagtataagtgttattctttgcttttacgtgaaacattgactacaatgtggattggtgagagaactggatacgaaaggaagaattatatggagataaaagaaatctctgttccgcaacaaggtattgtagcggactatatgaacggtaaaaaagagatacagtcatgttttgattatatgttaacagaagatgcttttaaacaacgtttacatgatttgcgtgaaagggagtttttccgccaagatttagtagcgcatttattagaatataatacaaaattacaagcgggagaatctacacttcaaaatgtaaaagcgcttggagatgaaaatacatatgttgttatagctggacaacaagcggggttattaactggaccgctttatacaattcataaagttatttcaattttacagcttgcaaaggaaaaggaagaaagtttaggagttaaagttgtccctgtcttctggattgcgggtgaagaccatgatatggatgagattaatcatacttttgtagcgaaaaataaaaagatgaaaaaaactattttttatgaccgtaatccgaaaaaggcaagtgcttctgagtctgaactttctgttgaagattgtagaaattggattgaagagatttttaaaacatacccagaaacaaattttacaaaagatgtattaaaatttgttgatgatgctttgaaaaaatcgaatacgtatgtagatttctttgctcatcttattacgaaaatctttgctaattctggtttaatccttgttgattcacatcatcctgaattaagaaagttagaaattccatttttcaagcgaattataagtaagtataaagaggtacaagagggccttcgtaatcagcaggaagtaattaaagaactaggatacaaaccgattattgaaacgaagtctcatgcagtgcatatattcatggaaatagataatgaacgagtattgcttgaagagcatcaaggtaagtttgttggaaaggatggggcgcattccttttcatacgaagagttgattgaagagatggagagaaatccggcacgttttagtaataatgttgtaacacgtcctcttatgcaagagtatgtatttcctacgctcgcatttattggaggtccaggggaattagcttattggagtgaattacagcaagtattccatactgtcggttttcaaatgccacctgtcgttcctcgtcttacaattacttatgtggagagagatatagcgacagatttattcgatctgcaattgagagaaattgatccgtttttaaatgatgtcgataaactgcgtgaaaactggttgtttaatcaaatagaggaaccgattgatgatcattttgaaaaggcgaaaaaagaaattgccgatattcatacatctttacagcaatttgtaaagaaaatagagccagggttaggtgcgtttgcagggaaaaacgaattgaaaattaatgaacaaattgaactgttggaaagaatgttgaaaagaaatgttgagaaaaagtatgaggttcagctaaataaattccgccgtatacaattcgcacttcgtccattaggtgcgccgcaagaacgtgtgtggaatgtatgttattatttaaatcagtttggtttggatttcgttgatcgtgtaatggaaaaccctttttcttgggacggaaaacatcatgttataaaactataaaatcttgctctttggagcaggattttatttttattccgttgaatttactgtgaagtgatttttttctgaattatcaatcaaaaaaatgttagatatggcaattgtgttggatacttaaatatatgacaaaatagcacaaaatgtaaacgtattattcgctttttcgacagttttttatttaaattcccgcaaaagatgataaaatttagtatataataaaagaaaatagcgatttgtatagtatgttgcctttgttggtaagttaaatgagtcgttctttcgtattatttcattctctaagcgtgaaatatgtgtttagaggaagggatacattcaacataattaattggaaaaagagtaggtgcaacaatgtttaaacacgtaacagtgcttttaaaggaaacagtagacggcttagatataaagccagatggtacatatgtagattgtacactggggggaggaggacatagttcttatttattatcccaattaactgaaggtggaaaattaatagcgtttgatcaagatgagatagcgattcaaaacgcgaaagaaaagttctcttcatacggtgaacagtttataacagtaaagagtaacttccgttatttagctgaaaaactgcaggaaataggtataacagaagtagatggtattttatttgatttaggtgtttcatccccacaattagatacaccagaacgaggctttagttatcatcatgatgcaccgctagatatgcggatggatcaagatgccccattaacagcgtatgatgttgtaaatagctggtcatatgaacaacttgtaaggattttcttccaatacggtgaagagaaattttcaaaacaaattgcaagaaaaattgaagcttatcgtgagaataaagctattgaaacgacaggagaattagtagagctaattaaagaaggtattccggctccagctcgtagaacgggtgggcatcctgctaagcgagtgtttcaggcaattcgtatagctgtaaatgatgaattaaaagtatttgaagaagcattggaatctgctattgagatggttaagccaggtggaagagttagtgttataacattccattcattagaagatcgtatttgtaaaacaacgtttaagcgaaatagtacaacgccacaattgccgccaggattaccgattattcctgatgaatttaagccgaaattaaagcttattacaagaaaaccgattttaccttctgatatagagctagaagaaaataatcgtgcgcgttctgcgaagttgagaatcgctgaaaaacgataaaagggagagagaggtatgactaatttagctgtaaagtacaaacaacaagcgcaagaagaggtgcaaattcaaacgcccccacagcagatggctaagccgaaggttaaagcgaaaattacaagaatcgaaaaactgttgtatgtagcgtttattggctttttattgtatgcctgtgtcgcgtttattggaaataaagcaggcctttatcaagttaatgtagaagcagcgacgatagaagaaaaaattgtacagcagcaaaaagaaaatcaagaattacaagctgaagtagagaagttaagtcgctatgaacgaatcgctgaagttgcaaaaaaacacgggctagaaattaatgcgaataatgtgaaaggcctcaaataaggcaataggtgtgaaggaacgatgaagaagaatatgactaaatttcataccaataagggagcaggttattttatgatatttttcctcctgctctttttgctgttattagcccgatttttttacatacaatcaacaggaacagttcataatcaggatttagatgcacttgctaaacaaaagcatagtaaaaaaggagttcttgaagcgaaccgaggaaccatttatgatcaaaacggtcatgtgttagcgcaagacgcaaactcttacaaaatggtagctgcactaaaaggtgctaactcagttgagaataaagaagatactgcaaagaaaattgcaggagtacttggaaaaggcgaagaggatattttagcttctttaaataaggaaggtagaagtcaagtcgaatttggaacgttaggcaaggatttgacgaaagaaaagaaggaacaaatagaagcgttgaagttgccgggaatatcttttattacagaaaatgcaagggtgtatccaaacggtgattttgcatcttacgttataggtcatgcaaaaccaaatgagaatggaacctcggtaggtcaatttggcatagagaaaagcttggataaatacttaagtgcctcgaacggagaagtagcatatacaggtgatcgtaaaggtgtgtcccttgatgggggaaaagttaatgtaaaggcacctaaaaatggagataacgcttatttaacaatcgatcaacgtgtccaaagttatttagaagacgcgatgaaagcagcaagtaagcaatatgagccagaaagtttaatagggattgttgcagatccgaaaactgggaaaatattagcgatgtctactaaacctagttatgaccctaatgatcgtcaaattaaatatttctttaatgacgcaattgccaatgcatttgaacctggatcaacaatgaaaattttcacgttagcggcagctattaatgaaggtgtgtacaaaggccaagattattatcagtccgggacatatcaagtcggaaataggaaaataaaagatcataacggtggtgctggttggggctctatcacgtttgatgaaggggtagagcgttcttcaaacgtagcgtttgcaattttaggagatcaaaaacttggtccagaacgtttccgaaaatatattcatagttttggattagatgaaaaaacgaacattgatttatcaggtgaaggatcgaatacaattttatttgatcagcaaatacaacaagtgacaacagcttttggacaaggttccactgtaacaccaattcagcttgtacaagctgcaacggccattgcaaatgatgggaaaatgatgaaaccttatgcaattgataaaattgtagatccgataacagacaaagtaaaattagaacataagccagaagaagtaggaaaacctgttacaaaggaaacagcagcgcaagtaagacaattattagaacgtgttgttacatctccgaaaggtacagggacagcttataaaattgatggatattcagttggtggtaaaacaggtacagcgcaaattccggatggaaaaggcggctatatgacagggagacagaattatatattctcattcttaggtatggcaccaatggacgatccacaacttgttgtgtatgtagctgttaaacagcctaaattaaaagatgatgagaacggtgcacaaccgttagctgatatttttaaatatgtaacaaaaaatagtttagagtatttaaagattaagccaaatgaagttaaagatccgaaaaaacatctgaaagaacaacaaactactgttccggatgtaaatggtaaaacgatggctgaagcggggaaagcgattgataaagcaaaacttcgtccaatcgtactaggtgaagggaaagtacagcaacaagtaccaaaagcgactgaacaaacattaaaaggcgaccgagtcttcttggtaggagataagcctacaatgccaaatatacaaggatgggcactgcgtgatgttatgaatttagcgaagacattacagcttaacttgaaaccttctggtacaggatacgtaacagaacaaagtgtggcggaaggaacattattacaacctggtacagaattaggtgtcacactcgtaccgccactcgaaccacagcaagaagcagaaaagccgtaatggtaaaagagaataagttctaattaaataagtacaagcatatattggaacaagctaggcgtaagggaggcttgttccaatatgcgtgtatcaaatgtaacagttagaaaacgacttatttttatacttatatcaggtatacttattttcacgattatcgatattcgtcttggatatgtgcaattttttcttgggaatatgttaacggatcgtgcgaaagattcatggagtcgtaatattacttttgaacccgaacgtgggaaaattttagaccgaaatggtgtggaacttgccacgaataaaagtgctccaactgtctttgttgtaccgaggcaaattgaaaaaccagcggagactgcagagaagttagctgcagtattaggtgtggaaaaagatgagatttataaaaggattacaaaaaaagaatcgattgtaaggttagataaaggcggaaggaaaatatcacatgacaaagcgaaagaagtacgaggattaagtctgaagggcgtgtatatcgcagaggattctatccggtactatccgtttggaaactttttatcacatgtattaggttttgcaggtagcgataaccaaggtcttatgggactagaaaaatattatgataaagagctaaatggggacaaaggtcatgtgcgtttttttgcagatgcgaaaggacaaaggatgcctaatgttggtgatgatttcaaaaagccagaagccggtttaaatttaggattaacaatcgatgcgcgtattacaaggattatggaaagagaaatgaatattgcggagtcaacttataatcctgacggtatgattgcgattgcaatgaaccctaaaaatggtgaagttttagggatgtctagtcgaccgagttttgacccagcggattttcaaagtgtctctccagaagtgtataacagaaatctacctgtatggagtacgtatgagcctggttcaacatttaagatcattacattagctgcagcattgaatgaaaatttagtagacttagagaaggatacgttttatgatgatggagcagctgaagtaggtggagctagattgaaatgctggaaagcaggaggtcatggcagtcaaacgtttttagaagtcgttcaaaactcatgtaacccgggatttattgaacttggtgatcgccttggtaaagaccgattatttaaatacattcgtaattttggttttgggcagaagactggaattgacttgcaaggtgaaggcagtgggattttatttaatttagataaagttggtccagtagagcaagcaacaacttcattcggccaaggagtttctgttacgccgattcaacaagtagcagctgtagcggcggctgtaaatggtggaacattgtatcagccgtatatagctaaggagtttattgatccgaaaaataatcaagttgttagtaaaaagacacctgttgagaaaagaaaagttatttccaaggaaacttcagaaaaagttcgttatgcattagagaatgttgtagcgaaaggttctggtaaaggtgcttatattgatggatatcgcgtaggtggaaaaacgggtactgctcaaaaggtgaaggatggtaaatatttagagaataattatatagtatcttttatcggatttgctccagcggatgatccagagattgttgtgtatgtagctgttgataatccaaaaggggttacacagtttggtggagtggtagcagctccgattgtcgggaatatccttcgagatgcgcttcctgttatgggagtgaaaccgagaaaagaacaagttgagaaagaatataaatggggcgatacaccaactgtggaagttccgaatttaattggaatgaaaaagaaagacttacaaacacaactcgtcgatttgaagcttgatataagtggagatggagagaaagtaattaaacaatcaccagaagcgggagctaaagtaaaagaaggctcaaaaattagaatttacttcgggaattaaaggtaacatagtacgttttatggtacaattggtggaagtgagttctttatagaacagttacttaatttgagacagtaagtgtctcattcataaataggtcagtagcacttacctccttatataggaggtaatgtgttgcttactgaaaaaagataaataaacaatgtagagagggtttagtgaaatgaagttgcatacacttgtatcatgtttgcatgattttccagttgttccaaaagaaaatccagaaatcacatctatagaagctgattcacgtaaagtgaaagagggaagcttatttgtatgtatgaaaggatatacggttgatagccatgattttgctaagcaagcagcggcacaaggagcggctgctattgttgcggaaagaccaattgatgttgacgttccagttgtacttgtgaaaaatacttttcgttcgttagcggttttagctgattatttttatggtcaaccgacacacaagttacatttaatcggaattacaggtacaaatggaaagacaacaacatcgcatattatggatgagattatgcgagcacatggtcataaaacagggctaattggaacgattaatatgaaaatcggtgatgaaacatttgaggtgaaaaatacaacaccagatgcactaacacttcaacagacgttttcaaaaatggttgaacaaggtgtggacagcacggtaatggaagtttcgtcacatgcgttagatcttggtcgtgtacacggatgtgattacgatgtagcggtgtttacgaatttaacacaagatcatttagactatcataaaacgatggaagaatataaacatgcaaaagggttactatttgcacagcttggcaatagttataatcataatcgtgaaaagtacgctgtgctgaatagcgatgataatgtaacagaagagtatatgagaagtactgcagcaacagttgtaacatatggtattgatacaacaagtgacattatggcaaaaaatatcgttatgacgagtggcgggactacatttacgcttgtcacaccatatgaaagtgtaaatgttacgatgaaattaataggtaaatttaatgtatataacgtacttgcagcaacagcagcaggacttgtttcgggtgtgaaattagaaacaatcattgctgttataaaagaactagctggggttccagggcgttttgaagttgttgatggaggacaaaattatacagttattgttgattacgcacatacgccggatagtttagaaaatgtattaaaaactgcaaaacaatttgcaaaaggtgatgtgtattgtatcgttggttgtggcggcgatagggaccgaacgaagagaccgataatggcaagtgttgcaacaaaatatgcaactcatgcaatttacacatcagataatccaagaagtgaagatccagcggctattttagatgatatggtacatggtgcaagtgggaaaaattatgaagtgattattgatagaaaagaagcgatacaccatgcaatcactaaagcgaaagcagatgatatcattattattgctggtaagggtcatgaaacgtatcaaattattggtaaagaagttcatcattttgatgatcgtgaagttgctaaagaagcaattaaagggcgtttaagcaacgaagagtaacaacgtgagaggaggactacatgtgcttgagcaaggtttattagtaacggctggggtagcattcttaatttctgttgccctttcgccattgtttattccatttttaagaaaattaaagttcggacagagtattcgtgatgagggaccaaagtcacatcaaaaaaaatcagggacaccgacaatgggtggtatcgtcatatacgtatctatgatggtaacttcacttattatggcgattaagtttaattatttaggtgcagaggtttcgttattactattagtgacgtttggttacggcttgattggatttttagatgactacataaaggtggttaagaagagaaatcttggtttaacatcaaagcaaaaattagtaggtcagcttgttattgctattgcattctttttaattggaaaagggcaagcgttccacacatacatcatgattccgggaacggatgttaagtttgaattaggttgggcgtatttcgtacttgtactatttatgcttattggtggatcaaatgcagttaacttaactgacggtttagatggtttattatcaggaacagctgctattgcatttggagcatttagtattattgctgtggcacaagagcaatttggagtggcgatattctgtatggcagttgtaggagctgtacttggatttttagtattcaatgcgaatccagcaaaagtgtttatgggagatacaggttcattagctttaggtggagccattgcagctgtagcgattttattaaaacaagaattgctacttgtaattatcggcggagtattcgtaatggaaactttatcggttatcattcaggtcatttcatttaaaacaacaggaaaacgtgtctttaaaatgagtccattacaccatcattatgaattatgtggttggtcagagtggcgtgttgttgtgacgttttggtctgcaggatttttattagctgtgttaggaatttatatcggggtgtggatgtaattgaaaactgtaactgaatttcaaaataagaatattcttgtattaggcattgcaaaaagtggttatgcagcagctacattgttacaaaagttaggggcaaatgttattgtaaatgacggaaagcctttagcagagaatgtacttgctgcagaattacaagcaaaaggaatggacgttgtatgcggtggtcatcctttagaattattagagagaaatatttctcttgtagtaaaaaatccaggaatcccgtattctaatccaatattagttgctgcgaaagaaaagcaaattccgattgttacggaagttgaattagcatatcgtatttcagaagcaccatttgttgggattacggggtctaacggtaaaacgacgacgacaatgctgacatttgaaatgctaaaagaaggacaaaagcatcctgtaattgcagggaacattggcactgtagcgtgtgaagtagcacaggatgcaaaagaaaatgaagttgtagttacagaactttcatcatttcaattgatgggagtagaattgttccaacctaaaattgctgcgtttttaaatttatttgaggcccacttagattatcatgggacgaagaaagaatatggtttagcgaaagcaaatatttttaaaaaccaaacagaaaatgattatagtgtaataaatgcagatgatgcagatgtgatggctttgtctgcgtattctaaaggtcaaaaaatcctgttttcgacaacgaaagaaattgaagatggcgcgtgtataaaagataacgctctttatttcaaaggtgaaaaagttgttgaagtaagcgatatcgttttacctggtcaacataatttagaaaatattttagctgcgatgagtattgcgaaattattaggtacttctaatgaagcaattacggtcgtgttaaaacgttttacgggtgtaaaacatcgtttagaatatgtaacaacgattaacaaccgtaagttttataatgattcaaaagcaacgaatatgttagcgactgagaaagcactatctgcgtttacacaaccgattgtgttactagcaggtgggcttgatcgcggaaatgaattcgatgatttaattccgtatttcaaaaatgtaaaagcgattgtaacatttggacaaacagctcctaaactagtaagagcggcagaaaaagcgggattagatataattgaaagtgtcgatactttagatgaagcagtggtgaaagcttatgctcattctaaagatggcgatgtcgttcttctttctccagcgtgtgcaagctgggatcaatttaaaacatttgaagaaagaggagacatttttatacaagctgtgcataaacttatataaagtaaatcaaaacatcagtaggctaacacctactgatgttttgttacatagggcaaaagtttctgcctaaagaggtggtgtttgtgggtaatgaagaaaacgcctgattttattctcatcatcgtaacactttcattgttgacaatcggaatgattatggtttatagtgcgagtgcagtttgggcctcttataaaatgggggactcattcttttttgcaaaaagacaattactgtttgcgggtcttggtgtagtagctatgttttttattatgaaaattgattattgggtgtggcgtacgtattcaaaagtgattttgctagtttgcttcattcttcttattctcgttcttattcctggagtaggtcttgttcgaggaggagcacgaagttggattggaatcggagcattttcgattcaaccgtcagaatttatgaagtttgcgatgattattttcttggcaaagtttttagcagaacggcaaaaattgattacatcttttaaacgtggtttattaccggcccttagttttgtgtttcttgcttttgggatgattatgttacagccagaccttgggacaggaacggtaatggttgggacatgtatcattatgatattcatttcgggagcgagggtctttcactttgcaatgtttggtttgattggtgtagcaggatttgtagggttaattgcatcagcaccgtatcgaatgaaacgcattacatcatatttagatccgtggtcagatccgctcgggagtggatttcaaattatccaatcattacttgcaattggacctggtggattatttgggcttggacttggacaaagtagacaaaaatttctttatttacctgaaccacaaactgactttatatttgcgatcttatccgaggaattaggttttattggtggttcatttgtgttattattatttagtctattattatggcgcgggattcgtatcgcattaggagcgccagatttatatggtacgtttttagcagtaggtattgtggcgatgattgcgattcaagtaatgattaatgttggtgttgtaacaggactgatgcctgttacgggtattaccttgccgtttttaagttatggtggatcaagtttgacattaatgttaatggcagtaggtgtattattaaatataagtcgccattctcgctactaaaccctgtttataagacagggtttttcgtatgtgtgtaaaaatgcaatatgtatatagaaataagtataatggaaataagaaaagagaagcggaggagttagtagtgcgtgtattagtgagtggtgggggtactggtggtcatatttatccagctcttgctttaattagagaaataaaaaagttaaatccagaagcgagatttttatatattggtacggaaaatggactagagagtacaatcgttccaaaagcaggtataccatttcaatctattgttataagtggatttaaacgaaaaatatcattagataatgtgaaaacagtaatgcgttttctaaaaggtgtacaggatagtaaacgatacattcgtcgttttaatccggatatcgtaattggaacgggtggatatgtatgtggaccagttgtatacgctgcagccaaattaggtattccaactattgtacatgaacaaaatagtgtaccaggtgtaacgaacaagtttttaagccgttatgttgataaagttgctgtttgttttgaagcagctatagagcattttccagagtcaaaagtggtaatgacaggtaatccacgagcatcagaggtaatggatcaaaatggaatgaaggggaaacgttcagttgggctttctcttcctaaaaagtctgtacttatatttggtggaagtcgtggggctagaccgattaacgatgccttcgttgaagcaattgaacagtttgggaacaaaagctacgaaatactatatgtaacgggtgaagtacattatgataaagtgatggaagccgtgaagcaaaaagggaacccaagcaatgttattattaagccgttcattcataatatgccagaggtactaactggtgtagaccttgttgtttcaagggctggggcaacaacacttgcagaattaacagcgttaggaaaaccaagtgtgttaataccgagtccgtatgtaacaaataatcatcaggaaaagaatgcacgttcagttgttgataaaggagcggcaaaaatgttacttgaaaaagatttaacagctgaaacgcttattcgtgatattgatgagattttattgaatgcacaaacattacaaaatatgaagctagcggctaagcaactaggtattccagatgcagcaaataagctgtatgaagtaatgaataagcttgtaaaaaaataaagtgaggctttaattagtggggagtgattctctctcgttgattattatctttcactaatcggatgtttactgacatcctgattccgcctaatttctttgttatcgccgaattttgatttaggagctgtactgcccgtaaatagagggataacgttaggtgaacgccctgcatattattgtcataaggagacttaatatgggggagattgtctatggaacaattagtaaatgagcttatagaagcagacgttggtcgtgttttagttaacgagccgttagcacgttatacaactatgaaaataggtggaccagcggatattttaattgtgccaaagcatgtagccggtattgaaaaaacattacagttagtaaagcaatacaaaacgaagtggactgtaattggtcgcggttcaaaccttcttgtatctgatcaaggcatagaaggtgttgttattcgtttaggagaaggattagatcacttagaggtcgaaaaacataaggtaagagttggtagtggatatcctcttattaaattgtcaactttacttagtcgtcaagggttagctggattggagtttgcgagcggtattccaggaagtgtcggtggtgcagtatatatgaatgcaggtgcacataaatcggatatatcgagtgtattatcgaaggctctcattctgtttgaagacggtacaattgcctggttaacgaataaagaactggagttttcttatcggtcatctgtattgcaaacgaaacgtcctggtattgttttagaggcggagtttcaattacaggcgggaaaacgtgaagaaattgtacgtagcatgcaaaataataaagactaccgccgtgaaacgcaaccatggaatcatccgtgtgcaggaagtatatttcggaatccaatcccacattttgcaggagatttagtagaaaaagcagggcttcgtggttataggattggtggagctcaaatttctgaaatgcatggcaattttattgttaataccgggggagcttcagcgcaagatgtaatgtctttaattgaattaataaaacatacaattaaggataaatttgatgtagatatgcacacagaagtagaaatcattggaagataacggttattcgttccgctcattatcatttatgttataataagaagataagaacggcatgaggaacatgccgttctttatgttacatagggggatcgtacatgaataatagtaaagtgattaaactacaagatcgtgtaccaaaattgaaaaatcaaaagaaaaaaaacaaaaaaaatgttaatcatcgattgattttatacatatcaattttatttttattagtgctctttttaatttattttcggtctccgcttagtaatataaaaaagattagtgtgtttggaaatcactatatgacggatgagcaagtaatgaaggattcaggcgtgacatatgatacaagttatttccgagtgacagcacataaagctgaagaaaacttaacgaagcgaaaagaaattaaagcagtaaatgtaaaaaaacgttttccaaacaagattgatattcatatcgaagaatatttaacgattggttatataaataaagagggaaaactacaaccgttattagaaaatggaaaaacgcttgatgtactacctaatggaaaacttcctgttgcagcaccgattttcgaaccttttaaagaagagaaaatgaaggagttaatcgctgaactagaaaaattaacaccagctattttaaaatctatttcggagattcgctattcaccaacaaatgcgaatgaagatcatcttactttatatatgaatgaaggttatgaagtgagcactacgattcaaaatttcgcaaaacgtatggaagcctatccacttattttaaaaacaattgagccaggtaagaaggtattaattgacttagaagtaggtgcatatacgaaagaattaggtgcggaagacaaaaaagaatagaatggtagttttcgttgcttatagcagaaaaaacgaaacgaatgttctattatatgtatacgaatttagaagaatggttcatttgatgaaaaatatgtaaaaattcttagattcatactagtattggtacaagtttcacttttctatgagtacatcttagtgtagacttatacttggcggtaaactttacactggaaatagaattatttcaagataagcagttattcatagtttactgcgatattcttaattgaatgctaaataaaaataagaaaaatatagggttaaaaaagggaaacgtataaagacgttgaatatttttcttataaatagtaaagttgcgattgttgttccatatattgagttgtatggtataaataaagaaggaggtgccaaagaatgaacagcaatgaaatatatgttagtcttgacatcggtacatccaatgttaaagtcatcattggtgaaatggttaatgacagcttaaacattattggtgttggaaatgtaaaatcaaatggtttaaagaagggatcgatagttgatatagacgagactgttcgatcaattaaaaaagcaattgaacaagctgagcgcatggtgggaatccacattgagcaagttgtagtaggtgtcaatgcaaaccaggtacagctacttccttgtcacggagtagtcgctgtttcaaatgaagatcgtgaaatcgggaatgaagatgtcttacgcgttctagatgcagcacaagttgtgtcaattgctccagagcgtgagtttattgatgtggtacctcgacagttcatcgtagacggtcttgacgagattaacgatccacgcgggatgatcggtgtaagattagaaatggaaggtacacttattacaggctcgagaactttactacataacctacttcgttgtgtagaaaaagcaggtcttgaaattgttgatatttgtcttcaacctttagcggctgcaacagttgctatatcttcagatgaaaaaaatagaggagtagcccttgttgatatggggggaggatctacaactttatctatttttaaagatggagagttacaagcgacgagcgtattaccattaggtggagaccatataacgaaagatattgcgattgggttgaaaacttcaacagaaaatgcagatcaaattaagttgaaatatggacatgctttttatgatacagcatctgaagaagagatgtttacggttcctattatgggaagtgatcaaacagaacaatattctcagttggaattatcggatataatagaggctcgtgtagaggaaattttaatgtttgttcaagatgaagtgcgtaagttaggagtaaagcaagtggcttctggttatgtactaactggcggaattgcttctatgccaggtgttcttgatcttgcatatgatattttacatgaaaatgttcgtgtagcaactcctgattatattggtgtgcgtgagccccaatatacaagtggagttggattaattaaacattcttatcaaaaagctaaattacgtgggaaaaatgtgcaggaaaagcaagagcattttgaaccagtaccagcaccagcaccaacgccggtacaacagcaacccgcgaaacaaaaaactcgtaatcaaaacaataataatcaaaatgatgaccgcatgatgtcaaaagtaaaacgtgtattccgttatttatgggattaaaattggacacgaaaaatgaggttctagggggatttcgacatgttagagtttgatactactcaagatcaattagcgaatataaaagttatcggtgtcggcggtggcggaaacaatgctgtaaaccgtatgattgaacacggtgtacaaggtgtagactttatcgctgtgaacactgatgcacaagcattaaatctatcaaaagctgaaacaaaaatgcaaattggtggaaaattaacgcgtggacttggtgcaggcgcaaaccctgaagtagggaaaaaagctgcagaagaaagtaaagaacagatccaagaagcacttcgtggtgcggatatggtcttcgtaactgccggtatgggcggtggaactggaactggtgcagctccagttgttgctcaagttgcaaaagaattaggtgctttaacagttggtgttgtaacacgtccatttacttttgaaggacgtaagcgtgcgacgcaagcagcatctggtattgcagcatttaaagaaaatgtagatactcttattgtaattccaaacgatcgcttattagagattgttgataaaaatacgccaatgttagaagcattccgtgaagctgataacgtattacgtcaaggtgttcaaggtatttcggatttaattgcaacgccaggtttaattaacttagactttgcagacgtaaagacaattatgtctaatagaggttctgctttaatgggtattggttctggtaacggggaaaatcgtgctgcagaagctgcgaaaaaagcgatttctagtccattactagaaacatctattgatggagctcaaggtgttatcatgaacattacgggtggcgctaacttaagcttatatgaagtacaagaagcggcagatatcgtagcttcagcttcagatccagaagtaaatatgatcttcggttctgttattaacgaaggattaaaagatgatatcgttgtaactgtaattgcaactggttttgatgatagcattgcaactcaaccaccaaaaccaattattcgcccgaatgcgaaccacacgcaacaacagcaacaaccagtagctcaaccttcaaaacaacgtgaagtaaaacgtgaaatgaagcgtgaagagccagttgtacatgagcgtcattcagattcagatgatatcgatattccagcatttttacgtaaccgtcgtagacgataaaaaaaggagctttcatgctccttttttgttttttaaatggaaaagacctgctaagcaggtcttttttttatttggtatattttgttggtgaaaataagagtatatcattctatgaatttgtacttttattttttaccgacagattatgtctagaaatcacaaaataacaaaaaaacacctccgcaaattgacacactttcctattggatatgcattatactagtctcaacttgaaaaaagaggtgaattgtttggttgtttacgccgacgttgtttggttgttaaacgcctgcattgattttcttttgcttttattaacagctaccgtgttaaaaaagaaaatcaaaaaatggaggcttgtgttaggggcatttataggttcaactattgttatttttgcctttactccttttgcttctatgatgacacatccaattatgaaactactgtactcgttacttattgtgtatacagcatttgggtttacaacatttagaaattatgcacaaactgtttttactttttactttgtaacctttatggttggcggaggattaattggaactcatttctttttgcaaacgaatgaaatggtaaatggattggttcaatctcagtcaatttcttacggtgatccaattagttggttatttgttatttttggttttccagtaatttattatttttctaaaaagcgtattgaaagcgtagaggtcacgaaaatacactatgatcaaattgtgaaagtaaaaattcaattagcagaagaagaactagaactggcaggtcttattgacagtgggaaccaactttatgacccattaacaaaaacacccgttatgattatgcatgtttcatcattagaacattgcttaccatcttggttaacagaacaaatttattccaaaacagaaattcctcaaataccagaaaatgattctggttgggcgacaaaattacgcttaattcctttccgtgcagtaggggtagagagtcaatttttgtgggcaattaagcctgacagtgtgcaagttgaccatgaaggtagttctattgttgtaaacaaagtattaattggattaaatacacaacagctttctactaatggggagtatcaatgtattgtgcatccaaaaatgttgatttcacaaaaaatggtaattgcttaataatgagaggcgggataatatgatgaaattaaaattttatttagtatacctttggtataaagtattgctgaaattaggaattaagaccgatgaaatttattatattggtggaagtgaagcgttgccaccaccgttaacaaaagaagaagaggaagttcttttgaataaattgccaaaaggagatcaggcagcaaggtcattacttattgaacgtaacttaaggctcgttgtatatatagcaagaaagtttgaaaatacagggataaatattgaagatttgattagtataggaacaatcggccttattaaagcggtaaatacatttaatccagaaaagaaaataaaattagcaacatatgcatcgcgttgtatagaaaatgaaattttaatgcatttacgtcgaaataacaaaaatcgttcggaagtttcttttgatgaaccactaaacattgattgggatgggaatgaactgttattgtctgacgtgttaggtacagatgatgatattattacaaaagatttagaagctactgtagatcgtcaccttttaatgaaagcattacaccaattaaatgatcgtgaaaaacaaattatggaacttcggtttgggcttgctggaggagaggaaaagacgcaaaaagatgtggctgatatgcttgggatttcacagtcatacatttcgcgtttagaaaaaagaattataaaaagattacgaaaagaatttaataaaatggtgtaaagaataagaccagccgttatgtaggctggtcttattctatttagttgtattaggaaagataatttaaataacaaatcgtgaaaaaaccacatgcataaaatccccttcaaaggaaatactttacactgtacagcaactcccgataggagggaacactttgacgagaaacaaagtagaaatttgcggtgttgatacagctaaacttccagtattaaaaaatgaagagatgcgtaaattatttcgtgaaatgcaaagtggagagataagcgcaagagaaaaattagtgaatggaaacttacgtcttgtactgagcgtcatccaaagatttaataacagaggagaatatgttgacgatttatttcaagttggttgcatcggacttatgaaatcaattgataattttgatttaggccaaaatgtaaaattttcaacgtatgctgtgccgatgattattggggaaatacgcagatatttgcgtgataataatccgattcgcgtatcgcgctcattgcgagatattgcgtataaagctttgcaagtaagagaaaagttgattgcagaaaattcaaaagaaccaacagcaatggatattgcaaaagtgctagaagtaactcatgaagagatagtatttgctttagatgcaattcaagatccagtttcattatttgaaccgatttataatgatgggggagatcctatctttgttatggatcagttaagtgatgaaaaacaaaaggacgagcagtgggttgaagaattagcattgaaagaaggaatgaagcgtttaaatgatagagagaaaatgattattagaaaacgtttcttccaaggaaagacacagatggaagttgcagaagaaattgggatttcccaagcgcaagtatcacgtttagagaagtcagccattaaacaaatgaataaaacgattcaaggataaggtctcaccaattatggtgagacctttttatatgtaatatggtttgtgctcatagtaggggatttgtgttcatataatgaaactagcatggtgtttcgtgtaggtggcttcctgtaaatatgagaaacagtttccaatttgtcatataagggagaggataaaaatggtgatacgaatttcagagttacagatgaaggatgttataaatatttcagatggaaaaaggattgggaatattggagatattgaaattgatatgaacacagggaaaatttgttctgttattatttcaaaacagacacgtatgctaggtatttttggaaaagatgttgagattgtaattccttggaaggaaattgtgaaaattggggaagatgtcatacttgtaagagtaaatcctgttaattctgtaacagaatcaatacaaacaccgacaatttcataaagaatattacaaattcctcttttttttctgttaggattatgaaaaaataaaagtatggtaaaatagacaggaagtaccatgcttttttctgttattttaattaaaaggagccgctttattatgagagaaccatttaaatatgtggacggtatactgtatttacaagcgtggaaagaacttggaaacattactgctggatttacgacaaaagatggtgggataagtacgggctcctttcatgcgatgaatttaggattacatgtgaatgatatcgtggagaacgttcatgaaaacagacgcattttagcaaataagttacaaaaaccattagaaaattggatttgctctgaacaagttcatgctcatcatgttgaaaaagtagggcaacaggaaaagggaagtggtgtctattcatatgaggacggcatttcaaaaacagatggcatttatacgagtaatgaagatgttctgttaacgtcttgttacgcggattgtgttccgctctatttttatgcaccatcacatggtatgataggacttgcgcatgctggatggaaaggcactgtacaagagattgcaaaggaaatgattcaaaagtggaatgcagaaggtatttcaagtgatgaaattcatgttgcaattgggccgtcgatcggatcttgttgttatgttgtggatgatcgtgtattaacagcagcacaggaagtagttaggggtgctgttcctcatcaaaaaatttctgacgggcagtacgcaattaatttaaaagaaattaatcgtatattatgtgtacaagcaggcataaaagaagagcatattgtaatgtcatctctttgtacaagctgtgaagagcaactatttttctctcatcgtcgtgatcaaggtaagacaggaagaatgttgagtttcataggttttaaggaggaagaaagcaagtgacagtacaagaaaatttagaaattgtaaacgaagctattaaagaatcttgcgctcgagctggacgttcgttgcaagatattaaacttgttgcagttacaaaaactgtagggattgaaaaaacaaatgaagtaattgaagctggagttatcgatttaggtgaaaatagaaatgaaggtttcttacagaaatacgagcatttcggttcaaaagttaattggcactttattggctcattacaaacgagaaaagtaaaagaaatcattaatgaaattgattatttacattcgttagatcgtctttcactggcgaaagaaattcagaaacgtgctgataagaaagtgaaatgctttattcaagtgaaaacctcatctgaagaatcgaagcaaggattggcaatagaagaggttgtttcttttattcaaagtttgcaagaattcgataaaattgaagtggttggactaatgacgatggctccatttacagaagaagaggaagaaatcagacgctgttttaaggaattacgtatgctgcaaacagaggtgcaggagctagagttattacatgcgccatgtaaagaattatcaatgggaatgtccaacgattacaagattgcaattgaagaaggggctacatatattcgtttgggaacgattttagtaggaaaagcgtaaaaggaaggagaatcttattatgagttggtcaaaagtaaaatacttcttttttgatacaccggaagaaaaagaagcagctcaatatggttatgaaaaggagcaaacagacatgaaaaagcagcaagatccaccagaacaacaagacgttacgtttccgaaagcgcaaccgaagcaaaatgttgtgagtattgaaacagcaaaacaatcttcaaaagttgttttattagaaccacgcacatattcggaagcacaagggattgcggaccacttaaaaggtagacgagctgttgtaattaatttgcagagaatgtctactgatcaagcggtacgtatcgttgactttttaagtggtactgtatacgctataggcggggacattcaaaaaatagggccgaaaacatttatgtgtacacctgaaaatgtagatattgttggtgcgatttcagagttattcggtgaagaagaagaaacaaatataaagaggtggtaatacgccatgacaacagtttttatagtgttaagttatgctatcgagatttactcgtgggcacttattatttacattctcctatcatggtttcctggtgcaaaggaatcatcttttggagagttcctggcacgtatttgtgaaccgtatttagaaccattccgccgctttattccgccgcttggaatgattgatatttctccaatcgttgcaatctttgcgttgaaacttgctaaaactggtttgttcagtttattaagctatttcttatagtaagaaggtaaatacatgagcatctacgaacattttaggcctgatgaggaggtctttgtggataaagtgctagagtggaagcgagcggcggagtaccatcaagtgaagttaacggattttcttgatcctaggcaacaacaaattgtttctatggtaataggacaaggtgatgttgctgtgcaatttggtggtgcaacgcctaatgcagagcgtaaaagagcacttatttatccagactatctagaattaaatgaagaagaatttcaagtagaagtattagaaattgactatccttccaagttttatacgctagaacataggcaaatattaggtacatttatgtctcttggtttaacaagagaaaaatgtggtgatattttgctgcaagaaaatcgtgcccaaattgtagttgcgaaagaaattgtatcgtatattgagatgaacttacaatcaatagggaaagtaaaagtctctttagcgtcagtgcaaggagaacaaattctacagatacatgaaacgtggggagagaaatctggaacggtttcttcacttcgtttagatgttatgttagctgaaatgttacatttatctagacagaaagtacaacctttcataaaaaatggtttagtaaaagtcaattggaaaacagtggagcaaacttcttatgaatgttatccaggagatgttttttctgttagaggatatggccgaagtaaattattttctgtagaaggtagaacaaaacgcgacaaatggagaattttgtatggtatactaaaatgattggttttttagaaggaaatcctcctattttgtcgaagaaaagatataattgaaagaggaaatttagataactacttggaggtggcgttgtgccgttaacaccattagatattcataacaaagaatttggtcgcggattccgtggctatgatgaagatcaagtaaatgagtttcttgatcaaattatcaaagattatgaattggtcattcgtgagaaaaaagctttagaagaaaaagttgcgcagttagaagggaagttagatcatttctctaatattgaagatacgttaaacaaatctatcgttgttgcacaagaagcagcggaagaagtaaaacgtaatgcgcaaaaagaagcgaaattaattgtgcgtgaagctgaaaagaatgctgatcgtattattaacgaagcattagtaaaatcaagaaaagttgcttttgatattgaagagctaaagaaacaagcgaaagtattccgaactcgtttccgtatgttattagaaacacagcttgagatgttaaacaacgatgattgggataaactaattgaattagaagacgaagtagatgaactgttgaaaaaagaagaaacagtgtaagcttgacgtttttctcattattacatataattttaaacaacatatttattaagaaaaacgaagatagggataagtaccttttcaaaccttatatagcgaactgaggatggtgtaagctcaggataaggagatagtgggaatatcaccctggagttccgcgctgaacaaatagagtaagcgtaggcgtgtattcgcgttaagaatataaagaggattctatacatatgtatagaatctactagggtggtaccgcgggagactttctcgtcccttttggggatgagaaggtctcttttttattccgttttttaagtatttcttttatacatgtaaggaggaattgagcatggagtacaaaaatacattactgatgccaaaaacagagttcccaatgcgtgggaatttaccaaaacgtgagcctgcaatgcaagaaaaatgggctgaaatgaatatttacgaaaaagtacaagaacatacaaaaggtcgtcctttatttgtattgcatgatggacctccatatgcgaatggtgacattcatatgggacatgcattaaataaagtattaaaagactttattgttcgttataaatcaatgactggttttagtgcgccatatgttccgggatgggatacgcacggtttaccaattgaacaagctttaacaaataaaggtgtaaaacgtaaagaaatgacagttgctgagttccgtaagttatgtgcagagtatgcatatgaacaagtagaacgtcaacgtgagcaatttaagcgtctaggtgtacgtgcagattgggataatccatatattactttagagccagcttatgaagcacaacaaattaaagtgtttggtgacatggcgaaaaaaggttatatctataaaggtcaaaaaccagtttactggtctccaacgagtgaatctgctttagcagaagctgaaattgaatatcaagataaaaaatcagcatctatttacgtagcattccctgtaaaagatggaaagaacgtattagaaggtgatgaaaagtacatcatttggacaacaacaccttggacattacctgcaaacttaggtatttctgttcatccagagcttgaatatagcattgtaaaagtaaatgatgagaaatatatcattgcttctgagctgtttgagacagttgcaaaaacgttagagtgggaaaatgctgaagttgtgaaaacagtaaaaggtagcgaacttgagtatacagttgcaaaacatccattctacgatcgtgattcattagttatgctaggagatcacgtaacaacagatgcaggtacaggttgtgttcatacagcaccaggacacggggaagatgacttcgttgttggtaaaaagtatggattagaagtactttgcccagtcgatgataaaggtgtattaacaaatgaggcacctggatttgaaggcttattctatgataaagctaacaaaccaattacagaaaaattagaagaagtaggcgcgttactgaaactaacattcattacacattcatacccacatgattggagaacgaaaaaaccaattattttccgtgcgacagcacagtggtttgcatctattgaagcattccgtaaagaattaatagaagctgtagcagaaacaaaatgggtaccagcatggggagaaactcgtcttcataatatggttcgtgaccgtggtgactggtgtatttctcgtcagcgtgcatggggtgtgccaattccggtattctatgctgagaatggtgatccaattattacggatgaaacaattaaccatgtagcagatttattccgtgaacacggttctaacgtatggttcgagcgtgaagcgaaagatctattaccagaaggatttacacatccaggtagtccaaatggtgaattccgtaaagaaacagacatcatggatgtatggttcgattcaggttcttctcaccaagcggtattagaagagcgcgaagatttacagcgtccagctgatttatatttagaaggatctgaccagtatcgtggttggtttaactcttcattatcaacagcagttgctgtaacaggtaaagctccatataaaggcgtactaagccacggtttcgtactagatggtgaaggacgtaaaatgagtaagtcgattggaaacatcgtcgtaccgaagaaaatcatggatcaattaggcggagacattttacgcttatgggtatcttctgttgactatcaatctgacgtacgtatttcagatgatattttaaaacaagtagcagaagtgtatcgtaaaatccgtaacacattccgtttcttattaggaaacttagacgactttaagccaagtgaaaatgcagtagctgtagctgaacttcgtgaagtagatcgttacatgttagtaaaattaaatgacttaattacaaaagttaaagaagcatatgagacatacgatttcgctgctgtgtatcatgcaattcataacttctgtacaattgatttaagttcattctacttagactttgcaaaagacatcttatacattgaaggtgcaaaccacgaagatcgtcgtgcaattcaaactgtattatatgatgttcttgttgcgttaacgaaacttgtaacaccaatcttaccgcacacagctgatgaagtatggccatatattccaggcgtaacagaagaaagtgtacaattaactgatatgccagaagctgtacaattagatgacgcggaagcgttaaaaacaaaatgggatgcatttatgacattacgtgatgacgtgttaaaagcactagaagtagctcgtaatgaaaaagtaatcggtaagtcattaaatgcaagcattacgctatatccaactgcagaaatgaaagctatgttagagtctattagcgaagacttaaagcaattattcatcgtttctgagtataaacttggtggtatgatggatgaagcgccagcagatgcaccgaagtatgaacatacagcggttgttgttgttcaagcaactggtgaaacatgtgaacgttgttgggtagtttcagaaacaattggtaaagatgctgaacatgaaacattatgtgagcgttgtgcaacagttgttaaagaaaactatgtaaaataataaaaaactgactgctattgatgcggtcagtttttttgttgatggtatatcaagatcactttcagactctttcctgtgaaggaaaaatgtgtgtgaggtaagcaaataaatttcggacacactaactgtacattacagctaggaggaatgtacacgtgaatgaaatttacatggaaataaaagaagaattgcaattgatgagaaaagagttgcaagagagactagctaaagaagtaatgcacaaatatgatgtcgagttcagccaagagcttggatatgaaattaaggaagagataaagaaaaaattgctattacatgatataaaagaggatttaaaggatgtagaacgcgcattatttaaaatggaaatagacatgtatggtatttgtgaagagacggggagattaatttccacaaagcaaatgaagacaatgccgactgcccgtacgattcatgaattcttctacgaaaaggtaaatgtatgaatacgcacaacgatattatattacctttttttaatttattttattcttctataaaggttcattgtgaaaaggtagcagctatgctaaaattttgaggtacactgtctttgtgggggaaatgaaaatgatatattatgtaatagcgttattcgtcattgctatcgatcaaatatcgaagtggttaattgtaaagaacatggaattgggtacgagtattccgattatcgacaatgtattatacataacatcacatcgaaatagaggcgctgcttggggtattttagaaaataaaatgtggttcttctacattattacagttgtttttgtagtgtttattgtattttatatgaaaaagtatgcgaaaacagacaagcttctaggtatttcgttaagcctaattttgggcggggcaattggtaactttattgatcgtgtatttagacaagaagtagtggatttcattcacgtgtatattttctcgtacaactatccagtattcaatatagctgattcagcattatgtattggtgttgtattaattattattcaaacattattagaaggcaagaaagcgaaggagtaattgaatgagtgaagtagtacaagtaacagttgcagcagagcaaaaaaacgagcgaattgataaattcgttgcagggataaataacgaatggtcacgtacgcaagtgcagcaatggattaaagatgacgttgtgacagtaaacggaaaagcggtaaaagggaattataaagtaaaagaagaagatgaaattacagtaacaattcctgaaccagaagagttagatattcaaccagaggatttaaatttagaaatttattatgaagatgcagatgtgcttgttgtaaataagccacgtggtatggttgtacatccagcaccagggcatacaagtggtacacttgtaaacggccttatgcaccattgtacagacttatcaggcattaacggtgtaatgcgtccaggtatcgtgcatcgtattgataaagatacatctggactattaatggttgctaaaaatgatatggcacatgaatcgcttgtaaatcagcttgtagcaaaaacagtaacgagacgttacaaagcgattgtacacggtgtgattccgcatgataagggaacgattgatgctccgattgctcgtgataagaaagagcgtcaaagtatgacagttgatgaaaatggtaagaacgctgttacgcacttccaagtgttagaacgctttaaagactttacgcttgtagaatgtcgcttagaaacgggacgtacgcaccaaattcgtgttcatatgaaatatattggctatccacttgcaggagatccgaagtatggtccgaagaaaacgttagatatgaatggacaagcacttcatgcgggtattttaggctttgatcatcctcgtactggtgaatatattcagtttgaggcaccgattccagaagtgtttgaagacgtattaaatattttacgaaaatagtattgacaaatcataagaaaactgagatactgacaacagttaaataatgatcctttaacacagccccgtgaggttgagaaggtaacggtttgaaatacttagggtatgttgtacccttttttcaaaagtcctctcgcacacgctgagaggactttttttataccattactctcacgcaagaaaaaagcttggaggtgtagagcatgcaagagaaagctgtcgttttagatgaccaaatgattcgccgcgctttaacacgaattagtcatgaaatcgtggaacgaaataaaggtgtcgataattgtgttcttgtcggaattaaaactcgtggaatttttattgcacaacgtttggcagaacgaattggtcaaattgaaggaaaagaaatggaagttggagagttagacattacgttatatcgtgatgatttaacactacaatcgaaaaataaagaaccacttgtaaaaggttctgatatccctgtagatattacgaagaagaaagttatccttgtggatgacgtattatatacaggaagaacagttcgagcagcaatggatgctcttatggatttaggtagaccatctcaaatccaattggcggttcttgttgatagaggtcatcgcgaattaccaattcgcgctgattatgtagggaagaacattccaacatcaagtgaagagcgtatcgaagttgatttgcaagagacagatcaacaagatcgagtaagcatatacgataagtaaagcccttttaaatgtagtcctgtgaggctgccaaagggtcttggctttcatatgtcaaatttggcatacgaaagtgtaggactctttgtgcacaggcacaaagagtttttttattgcaaagatttaaactgaaggaggatgtaacaatggaacaaaagccagtgttagacgttaatgaagtaccgaaaccgggaaaatggttatttttaagtatacaacatttgttcgcgatgtttggatcaacagtgcttgttccgtttttaacaggattgaatccatcagtagcattaatatcaagtggattaggaacgttagcgttccttcttataacgaaaggtcaagtacctgcctatctaggatcatcattcgcctttatcgcaccgattataacagcgaaaacggcaggtggaccgggagcagcaatgcttggtggtttgctagcaggacttgtgtacatcttaatctcactcggaattaagaaatcaggatcagagtggattatgaaattactaccaccaatcgtagttggtccagtagtaatggtaatcggtctagctttagcacatacagcagttaacatggcgatgaacggtgcggatggcaaatatagctttacacacttttcagtagcattagtaacattagcaattacaattatatgctcgatatttggaaaaggatttttcagtataataccagtgttacttggcattatcggcggatatatcttcgcttacttccaagggctagtagacttaaagccggtagctgaggcaaaatggtttgttgtaccagatttcacagtaccatttgtaacatatacaccagagttttcatggaagattgtactcttgatggtaccagttgcactagtaacaatatcagaacatatcggacatcaaattgttcttggaaatgttattaaaagagatttaattgaaaaaccaggtttacaccgttcaatcttcggtgacggagtagcaacattaattgcgtcactaatcggtgggccaccgaatacaacgtatggtgaaaacatcggtgtgctagcaattacgagagcatacagtgtatacttattcatcggttcagcagtattcgcaatcatgttcgggtttatcggtaagatttctgcactgattcattcgatcccaacaccagttatgggtggtgtatcaatcttactattcggtgtaatcgcatcaagcggattacgcatgatggtagatgataaaacagatttaagtgacaaacgaaacttaatgattgcatcagtaatattagtaatcggtattggtggagcggtacttcacgtaggagaatcattccaagtagaaggaatggcactagcagcaattgtaggtgtactgttaaatctactactaccggaaacgaaacaaataaaacaatctaagcagattgcttcataataataaccttttaattcagtcctgtgagaccggaaagggtggcttctttcttgcaccctagtctcacatgactagggtatttttatgcaaaggttgttataaaaattcaaaagtggtaacataaaaatcagaaagatgagggatgacgatgagccatttgttaacgatgagtgaattatcggaagtagaaatttcagaaatcctaaaagatgcagaagattttgcgaatggaaaagagagcaaaacgacagagcaaacttttgttgcgaacttgttctttgagaatagtacgagaacgagatttagctttgaagttgctgagaagagattaggacttgatgttttaaacttttcagctgatgcatctagcgtacaaaaaggagaaactttatacgatacgataagaacactagaatcaatcggaacaaaagcagtggtcatccgccacgagcaagatcgctacttcgatgaactaaaagatcaggtgaatattccaatcttaaacgctggagatggatgcggaaaccacccaacgcagtgcctactcgatcttcttacaattaaacaagagtttggaagatttgaaggtttgaagattgcaatagtaggagatgttcgtcatagccgagtagcacgttctaatgcagaagcattaacgaagcttggtgcaacaatttactttgcaagtccagaagagtggaaagatgaagacaacacatttggaacatacaaaccattagatgaacttgttccagaagttgatgtaatgatgttactccgtgtacaacatgagcgtcatgatcattatgaaacagacattatgaaagaatatcatgagaaacacggattaacagtagaaagagaaaagcgtatgaaagaaggaagcattattatgcatccagctcctgtaaaccgtgatgttgaaattgcaagtgaacttgttgagtgtgagcgttcacgcatatttaaacaaatggaaaatggagtttacgtaagaatggctgtactaaaacgcgccttaccaaatgtattaggaggaatgaaacatgaattatttgtttaaaaatggtcgttatatgaatgaagaaggaaaaatcgtagcaacggatcttctcgtacaagacggtaaaatcgctaaggtagcagaaaatattacggcagataatgctgaagtaatcgatgtgaacggaaagttaatcgcacctggattagtagatgtacacgtacatcttcgtgaaccaggtggtgaacataaagaaacaattgaaacaggtacactagcagcggcaaaaggtggattcactacaatttgcgcaatgccaaatacacgcccggtaccagaatgcagagaacatatggaagacttgcaaaaacgtattgaagaaaaagctcatgttaacgtactaccatacggagcaattacagtacgtcaagctggttctgaaatgacagatttcgaaacattaaaagaacttggagcatttgctttcacagatgacggcgtaggcgtacaagatgcgagcatgatgttagcggctatgaaacgtgcagcaaaattagatatggcagtagttgcgcactgtgaagagaatacgcttattaataaaggttgtgtacatgaagggaagttttctgagaaacacgcattaaacggtatcccatcagtatgtgaatctgtacatattgcaagggatatactgcttgctgaagcagcagattgccactatcacgtatgtcatgtaagtacgaaaggttcggtacgtgtaatccgtgatgcgaaacgcgctggaattaaagtaacagcagaagtaacaccgcatcacctagtgttatgtgaagatgatatcccatcagctgatcctaactttaaaatgaacccaccgcttcgtggaaaagaagaccatgcagcattaattgaaggtttattagatggaacgatcgatatgattgcaactgaccatgcaccgcatacagcggaagagaaagcacaaggaattgaaagagcaccgtttggaattactggttttgaaacagcattcccgcttctatacacaaaccttgtgaaaaagggagttattacgctagaacagttaattcaattcttaacagaaaagccagctgatacattcggcttagaagcaggtcgcctaaaagaaggtagagcagctgatattacaatcattgatttagaacaagaagaagagattgacccaacaacattcttatcaaaaggaaaaaatacaccattcgcaggttggaaatgccaaggatggccggtaatgacaatcgttggtggtaagatcgcatggcaaaaggagagtgcattagtatgaaaagacaacttatcttagaagatggaacagtattaattggaacaggtttcggaggcgaaatcgaaaagtcaggtgaggttgtatttacaacaggaatgactggatatcaagaaacattatctgatccatcatattgcggtcaaatcgtaacattcacgtacccattaatcggaaactacggcattaaccgtgacgattttgaatccattcacccatctgtaaatggtttaatcgtaaacgaaatttgtgatcatccatcaaacttccgtaatgaaatttcgttaaatgattacttgaaagaaagaaatatcccaggattagcagggattgatacgagaaaattaacgagaaaaattcgtcaatacggtacattacgcggacgcctttgtaatatggatgcagatgtagagtacattgtaagtcaattaaaagcgacagtatttacagatcatgtaaaacgcgtatcaacgaaagatccatacccaagcccaggtcgtggtcaccgagttgtactagtagacttcggtatgaaacatggtattttacgagaattaaataagcgtgactgtgatgtaattgtagttccttacaacacaacagcagaagaaattttacgccttagcccagatggaattatgttaagtaatggacctggagatccgaaagatgtatcagaagcaattgaaatgttaaaagacattatcggtaaagttcctttattcggaatttgcctaggacatcaattgttcgctctagcatcaggtgcaaatacaagtaagttgaaatttggtcaccgtggtttaaaccatccagtaaaaaatcttgcaactggaaaagtagcaattacatctcaaaatcacggatacgcagtagaagaagaatcagttgaaaatacagatcttgaaattacacatgttgctttaaacgatggaacggtagaaggtcttcgtcataagaagttcccagcatttacagtacaataccatccagaagcttcagcgggaccagaagatgcaaatgatttattcgaagatttcttaacaatgattgaaaacttcaagaaagaaggggaagagttatgccaaaacgcctagacattaacacaattttagtaatcggatcaggaccaattgtaattgggcaagcagcggagtttgactactctggtacacaagcttgtcaatctcttaaagaggaaggttacaaagtaatccttgttaactctaacccagcaacaattatgacggatactgcaacagcagataaagtatacatcgagccattaacattagaattcgtaagccgtattattcgtaaagaacgtcctgatgcaatcctaccaacattaggtggtcaaacaggtttaaacatggctgttgaacttgcaaaatcaggcgtacttgacgagtgcggagttgaaattttaggaacaaaattatcagcaatcgagcaagcggaagatcgtgatttattccgtacattaatgcaagatttaaatgaaccaacaccaccaagtgaaattattcataaccttgatgaagcatatggatttgtaaatgaaattggttatccagtaatcgttcgaccagcgttcacattaggaggaacgggcgggggaatttgccataacgaagaagagctaattgaaatcgtaacaagtggtttaaaacatagtccagtaacacaatgtttattagagaaaagtattgctggctgtaaggaaattgaatatgaagtaatgcgtgattcaaatgataacgcgattgtagtatgtaacatggaaaacatcgatccagttggtgttcacacaggtgattcgattgtagtagcaccgagccaaacgctaagcgaccgtgaatatcaaatgttacgtaacacttcattacgaattattcgtgcactaggaattgaaggtggatgtaacgttcagcttgcgcttgatccatatagcttccaatactatgtaatcgaagtaaatccacgtgtaagtcgttcatctgcactagcatctaaagcaactggatatccaattgcgaaattagcagcaaaaattgcagtcggcttaacgttagatgaaattgtaaacccagtaacacaaaaaacttacgcttgcttcgagccagcgttagactatgttgtttcaaaaattccacgttggccgtttgataagtttgaatcagcgaacagaacgcttggaacacaaatgaaagcaactggtgaagttatgtcaatcggacgtaacttagaagaatcattactaaaagcagttcgttctttagagcttggcatttatcacttagaattagaccacttaaaagaacttgataaagaaacgatgaaaaaacgtatcattaaagcggatgatgaacgactgtttattgtagcagaagcaattcgccaaggtgtaacgaaagaagaaatcaatgaatggtgtgaaatggacttcttcttcttacaaaaagttgaaaacatcgtaaatatggaatgtgaagtaaaagcgaatgtaggaaatatagaagtactacaaactgcaaaagaaatgggcttcagcgatcactacattgcagcagcttggaacaaaacggagcgtgaaatttacgatatgcgtaaagaaaataatatgatgccagtattcaaaatggtagatacttgtgcggcagagtttgaatctgcaacgccatattactacagcacatatgcggacgaaaatgaatcgattgtaacagatcgtaagagtgtagtagttctaggatctggtccgatccgaattggtcaaggtgttgagtttgattacgcaacagttcactcagtatgggcaattaaagaagctggatatgaagcaattatcattaacaacaacccagaaacagtttcaacagacttcagtatttctgacaaattatactttgaaccattaacgattgaagatgtaatgcacattatcgatttagaaaaaccagaaggtgttatcgttcagttcggtggacaaacggcaattaacttagcagcgaaactagaagaacacggtgtgaaaattttaggaacatcacttgaagacttagaccgtgcagaagatcgtgataaattcgaagctgctttaacaaaacttggcatcccgcaaccagttggtaaaacagcaacgactgtagaacaagcggtagcaatcgcagaagaaattggttacccagtattagtaagaccatcttacgtactaggtggacgtgcaatggaaatcgtatatcgtcaagaagaactgctgcactacatgaaaaatgcagttaaagttcatgcagatcacccagtattaatcgaccgttacatggttggtaaagaaattgaagtagatgcaatttcggatggtgagaatgtattcattccaggtattatggaacatattgaacgcgctggagttcactctggtgactcaattggagtatatccaccacaaagtttatctgaaaaactaaaagaacaaatcattgaacatacaattgcacttggaaaaggattaaacattgttggattactaaatatccagtttgtagtattcaaagatcaagtgtacgtaattgaagtaaatccacgtgcaagccgtacagtaccgttcttaagtaaaattacaggcgtaccgatggcgaatgttgcaacgaaagttattttagggcaagacctagtagagcaaggatacggaactggctatcacccagaagagaaagaagtatatgtaaaagctccggtattctcattcgcgaaactacgctcagttgatacaacattaggacctgaaatgaaatcaacaggggaagtaatgggtaaagacttaacgcttgaaaaagcattatataaaggattagttgcttctggaattaacatcccaacgcacggctcagtaatcattactgtagctgataaagataaagaagaagcgatggaaattgcaaaacgtttccacgaaatcggctataacttattagcaacagctggaacagcacaatcattagaagagcaaaatatcccagtacaagttgtaaacaaaattgattctgaagactacaacttactagatattatccgtcaaggaaaagcacagtttgtaattaacacattaacaaaaggtaaacaaccagcgcgtgatggtttccgcattcgccgtgaatcagtagaaaatggtgtggcttgcttaacatcacttgatacaacgagagcaatcttacgagtattagaatctatgacattctcagctcattcaatgaaagaaattacgcaaacaaagcgtcacgaggtggtacatgcatgatgcaaaagcaaaatatgatcgtcgttaatcaaaaagaaatcgcaaaaaatatttacgaattagtgcttcaaggaacgttagtacagcaaatgaacgaaccagggcagtttgtacacattaaggtagcagagggcattgcgccccttctgcgccgcccaattagtatttgtaatgtagatcaagagaagaacgaatttacaatgctatatcgtgccgaaggacaagggacaaaaacattagcaactagaaaacaaggtgaaatggtagatgtactaggaccattaggacacggttttcctgtagaagaagcagaagctggtcaaacagctttactagtaggcgggggaattggtgtaccaccactttatgaattatcacagcgcctcgttgcaaaaggtgtacgtgttattcacatcttaggctttcaaacgaaagatgtagttttctatgaagaaaaatttgcagaacttggtgatacgtacgttgcaacagtagacggtacacacggtacaaaaggatttgtcacagatgtaattgataattacggaattgactttgatattctttattcatgtggtccgttagcgatgcttcgtgcattagaaggacgttacaaagagaaaaaagcctatatttcattagaagaacgtatgggctgtggtattggagcttgtttcgcatgtgtatgccacttacaagaagatccaagtggacattcttacaagaaggtgtgtagcgacggaccagtatttccaatcggggaggttgtactatgaacagattgcaagttgaattaccaggattatcattaaaaaatccaattataccggcatctggatgctttgggtttggtcgtgaatatgcacagttttacgatttaagtgtactaggatcaatcatgattaaagcgacgacagaacaaccacgttatggaaatccgacgcctcgtgttgctgaaacaccaggcggcatgctaaatgcaatcggacttcaaaacccgggattagacaaagtaatgaattcggaattaccatggttagaacaatttgaccttccaattattgcgaacgttgcaggctcacaagctgaggattacgtagcggttgcgaaggaaatttctaaagcgcctaatgtccatgcactagaattaaatatttcttgtccgaacgtaaaaacaggtggtatcgcctttggtacaaatcctgaaattgctgctgatttaacgaagcgagtaaaagaggtttctgaagtacctgtatacgtgaagttgtcaccgaacgtggcaaacattgtggaaattgcaaaagcgattgaaaatgcaggtgcagatggtttaacgatgattaatacattgcttggtatgcgtctagatttaaaaacagctaaaccaattttagcaaactgtacaggtggattatcaggtcctgcgattaagccagtagcaattcgtatggtacatgaagtaagccaagcggtaaacattccgattatcggaatgggtggtattgagacagcggaagatgtaattgaattcttctatgctggcgcaagcgcagttgcagtaggtacagcgaactttattgatccgttcgtatgtccgacaattattgaagagttaccagcattactagatgaattaggatttgatcacatttcggaatgtcaaggaaggagctggaagcaaacatgtcacagtcgttaatcgttgcattagattttccagggaaacaagatgtagaacaattcttgcgccactttgaaggggaagagttatttgtcaaagttggtatggagttattttacaaagaaggccctgcgattattacgtacttaaaagaaaaagggcataagatctttctagatttaaaacttcatgatattccaaatacggtaaaaagcgctatgcgtagcctagctagtctagatgttgatatggtaaatgttcatgctgctgggggaagcagtatgatgaaagctgcgattgagggattagaggaaggtaagcaagaaggaaaagagagaccgatttgtattgcagttacacaactaacaagcacttcggaagctatgatgaaaaaagagatcggcattgagaaaacgttagaagaagcggttgctcattatgcaaaactaacgaaagaaagtggacttgatggcgttgtttgttcaacacttgaagttccaaaattacgtgaagtatgcggaaatgaatttgtaacggtaacaccggggattcgtcttgcaagcgatgatgtaaatgaccaagtgcgcgtagcgacaccgaaacgtgcgagggaacttggctcaagctacattgtagttggacgtagtattacaaaagcagaaaatccgcttgaagcgtataaaacagtaaaacaacagtgggaaggtgtaacagtatgaaaaaagaaatcgcatcgcatttattagaaattggagcagtatttttacaaccgaatgatccattcacttggtcttcaggtatgaaatcgccaatttattgtgataaccgtttaactttatcttatccaaaagtacgtcaagcgattgcagctggattagaagagttaattaaagagcacttcccaactgtagaaattattgcaggaactgcaactgctggtattgcgcacgctgcatgggtaagcgatcgtatggatttaccaatgtgctacgtacgtagtaaagcaaaaggtcacggtaaagggaaccaaatcgaaggaaaagctgaaaaaggtcaaaaagtcgtagtagtagaagacttaatttcaactggcggtagtgcaattacatgtgtagaagcacttcgcgaagctggatgtgaagtattagggatcgtatcaatcttcacatacgagcttgaagcaggaaaagaaaaactagaagcagctaacgtagcatcatattctttaagtgattacagtacattaactgaagttgcagcagaaaaaggtatgattggacaagctgaaacgaagaaattacaagagtggcgtaaaaatccagctaacgaagcttggatcacagcgtaacacgaaaaaagacgaccgcgggggaacgcggtcgttttttatatcattgttaaaacttcaagtaaagttccatcaatatcaaagaaaatcatattacaatctccttaactacttagcgctttctgcaagctcatatcctcttaaaaacaataaagtcatataagaaacaataaatgagaagatgctgtacatgccaacccaaaagaaaaattttggagtaaaggcgataacacctattattaaaaaactagcaaacgttacaatcggcattacgtaatacgttttcgtcttgcgcgttccaataacagaaacgataaagataagtaatggacaaattaataagacgaaaatcaattcattcataggtatgtccccttttctaattgcagtaatctgtttctcgtaaacgttttgaaataattactctcctaatataatttcgctaagtaataacgaatccctcttgaaaactgataattcatgatgaattttacaagcaaaaaacgtaagcaagagaacacttgcttacgttataggataaacatcgcaacgatcgtggtgacaattaaaccgataacaaccggtaaaaagtttcggcgtgcaagttcaaatggatcgactttacaaatcgcagcagcaggaataagtgcccaaggaattaacgtcccgcccccggtccatatagctgcaatttgcccgagtgctgttaatgtagctgttccatggccaagtgctgttccaaaaagattggcaatggaaccagcaagtgatatacctgaaaaacctgatccatctaagccggtaatgacaccaacgatggttaatgtccctgccgatacatattgatttaaaggaacagtttgagataaagcgatgcctaagtcgttaatgattccgtgtgaacctttcggtaaatagtccccgataatttttacaaatccactatctcctaaataaaagagtgcagcgataggaataactggtccgaaaattttaaagccaaattggagcccttctatgaaataatcggtcgttttattcagtccatttcctttgtaggcgatgagggaaatgatgataatcataataacagtcgttccgccgataagtgcagttgcgtcgcttccttgtaatttaaattgaatcatgcaaaggatatcaatgatatatatgatagggatacaaatagcgagccatttttttatgcgagaagataatgaagtgagcgttttagaagactcagttgatggaatagcttcttgtatagataagcctgtatgaaactcttttcgtaagaagaaaaaagcgacagaagttgtcacaatgcccataacgataacgagtggaacacttgcagatacgatgctggaaacagggagaccagccgcgtctgcagttaatttcggtgcaccttgaataacgaagtctccagataaggcgatgccgtgtccaaataagttcatagcaattgcaaccccaattggaggaaggccgacacgtacagcaaccggtaataaaatagctcccattaaggcgacagctggagaaggccaaaagaagaaagaaatggtcatcattaaaaggccgataatccagtaggcgagtgtaggtgtacgaatcatttttgtaaatggtgaaatcatcgtatcatttatgccagtatgaacgagtaaattgctcattgatacgataatggagatgattaatatagttggtaatagctcagtaatggcgtaaatgaaactttgaaaaattccgctaatggcaagagggatagaacttgttgcagttaatgctaataaaaagataaaaacgatacaaatgatagtcgtatcttttcggagaataaaaaaggtaataatagtgagtaaacaaataatgtagagagcgtgtaatagcgttaattcaactcccataacattcacatcctttaggcattcgtgtagtgtattgtatgaaagcagtgaaagtatgtgagtataggaaaaagaaaaaatgaaatttcatgtactgtaatggtaagaaagataaatggatgttacaatacaaataatcctaaaaatggaatttaaggagaacttatgcgcaaaaaaattgggttttggggatttaccatatcttgtagtctattaatcactttaaatttgtttacaaacaatgaatggatcagtatcatacctgttttcggctttgtttttatactgttatataactgggatgatatgaaacaatatagtaagaaaagtatcggaattatgataggtgtcattgttgtttgctcatttttcgtagggtttattttaatagaagggcagaaacaaatagagaaaacgtctatttttcaagaatggatgtcgtctgcaaaaggtctttatattgtaattatagctgttatttttctaagaattattataagcatagcaagttacgtattaaaggagaagtagaatgggggagtacgaatgagagagaaaataggatattatggtgtgctcgtttgtttactattatcagttatttcaggacaattccttaacagtgactgggtaccagctatattatgtataggagtattgatttttgcatctatgtatcgttggaatgaatggaaagcatatagccgaaaaaagaaatttgttttcagtatcgagtttgtcattattattagcacaattccgttttttctattgaaaggaaatgagataatagatggaattgtaatgtttcaagggtggttatttattgcgaaaatgctgtatttaatatgtatattaatgtcggtagtggtaatcgttaaaaaagtaaacgaaaagttattcgttaatgaataaaagaaaatgccaccttattcggtggcatttttttctatgatttcaacaaggaataacaattagttcccgatttgattttgtaataacttcatagccttcttttgtaatgacgatatcgtcttcaattctacaaccgccccagttcggtatgtaaatgcccggctcaactgtaacaaccataccttcttgtaaagttaccttactttcttgggataggcgaagcggttcatgtatttctaacccaagaccgtgcccagtagagtggccaaagtattgaccgtatccatgttctgtaatgtaatccctcgttatatcatcgatacttttcgcagtttctccaggcttaatcgcttcagtcccacgttttaacgcttctcgtacaacattgtatatttttttgaattcttccgatggttcccctattgctacagtacgtgttatatcggaacaatatccgtcgtaaagtgcaccgaagtctaatgtaacgatatcccctcgttcgattattttatttgatgcaactccatggggaagtgaagaacgaacgcctgaggctacaatgatttggaatgaagaagatgtagcccctttttttcgcatgaaaaattctaattcatctcgtacagcattttcacttattcctggttttagaaacgtaagaatgtggtgaaatgcttcgtccgcgatattagctgcaattttcattgtttctatttcaggcgtgtctttaatgatacgaatattttcgataatttcgcacacttgaatcatttccgcctgtacgtatttttgcaagtttttatattgttgcaatgtcatgttgttttcttcaattccaagtttttgaatgtttaatttcgatacttgatgtgcaatttctttttctaaatttcctttatgcataataatttcagcatcttttatttgtgatttcgcttgatctacatagcggaaatcagtgataaaaacagcttgatcggcagagattaagacgacgccagcactacctgtaaagcctgttgcatattggcggttttcttttttggtaataagtaacccgtcaatttcatagttttgtaattgattttggattttattaatttttaaagtcatgttaattcctcctattcacagtattgaataaagcaaatagcgtgccaaaatgtatatttgaagaaaggatagtagggacaacatatattttaggggagataaaaaaatagcccgtaatttgtgggaggcggtttgttcataaaatctagattgcttcaatgaatagcagggggatggggaaaaataatgattggagttacacttgtactttatttacatgctgtaaaaaattttatacaaatgtgaaatgatactgtcaatttttttgacaatattgaatgaatatagcaacgaaattgaaaacatataaaaaatgcgctgcatacaagcaacgcattttttatttacgcttttaatttcattacaatatcagcatctggtgttacatatacggtttgctgattgtcgtacgtaacaaaaccaagttttgcaccactcggttttttgacatggcgtattttggtgaaatcaacaggtacagagctagactctttcgctttgctgtaataggcagcaattttggcagcttctagtaaagtttcttcagcaggctctaaagaacgaatgacaacgtgagagccaggtatgtctttcgtatgtaaccaaatttcatcacggcgggcaaacttcgttgttaaataatcattttgtttattgtttttaccaacgaaaatctctgtgccatcacttgctacatatttatctaatactggtttagtaggctttttctttgcgtttttcgttttgcgattgcgcacataaccttcttcagctaattcctcacgaatttcttcaatatcttttgaagaagcagcttccatttgttgaagtaagctatcaaaataaagaatttcttcatttgttttttcgatttgttcttctacaacaacaactgaattttttgctttttgatacttttggaaatagcgttgtgcattttcagatggtgtttttaaaggatctaatgtaatttttacagttccaccattctcatcgtaataattaacgacctcaatatctttatcgcccttttttaaagcgtacatattggctgtaagtagctctccaaatagttgatatttatctgcttttccagcatcttgcagtgttttttcgagtttaatgagttttttctcgtttttatttttttcgttttgcataaagcgttctaaatcatgagcttgttgttttacacgatcacgttctgctttgccaaagaagaaacgatctaacaattcgctcactgatgagaatgttttttcttctccttgcaagtgtgtaagagggaaaagataaaagaattcttttccatttgcagtaatcattgtaggtgtatatgcatgagatagtaatggtgtttgtatagagaaaaatgcttctgataatgctttctcgtttgccataccggctttctttactacttcttttgcaaataatggggatattcccatgaaagcaccgacgagttgtttatccatatttccagatagaaagtctagcggtctaataaaatcatctgcggtttcaatttgcagaggattgattttatgttgggctggtggcgcgacgtactcagcaccagcatatacagttcggtgacggtttacggctaatgaaacgtgttttaagctatctaaaatcacgtttgttttcgtatctaataagataatgttactatgtcgtcccattatttcaattactaatgtttttaatgattcgtctccgatttcattacgactgcgaactgtaatttgaataatgcgttctaagtcgatttgttcaattttttcaataaatccaccttctaaatgtttgcgaagaagcatacagaacatcggcggtattgctggcgaatcgtagttttgattcgttaagtgcatacgcgcatatgtaggatgagatgaaagaattagtttttggttctttccattcgctcgaatatgtaataaaatctcgtattttgaaggttgatatattttggaaattcttcctgtgtaaagagaattttcaatttcatgtgtaatcgctcttgtaaataatccatcgaatgccataaatgaacactcctttctaactaaatgttaattatagcatttttttggacgaggctgaataagctttcaatagagtatgtctggaatcaggaggtcgatagcaggatgaactggtatggaatgcgagcacatgaagtggaagaaagaacgaatacgaatgtaaaggttggacttacagagaaagaagcagaagggcgagtaaagaaatttggtactaatgaattagaagaagcaaaaaggccttctgcactaatggtatttttagcacagtttaaagatttcatggtactcgttttgtttggagcaacaattgtttctgcgtttttaggtgaatacattgattctattgctattgttgccattgttattatcaatggtattctcggcttttttcaagaaagaaaagctgaaaaatcattggaagctttaaaggaactagccgctccacaagttactgtaatgcggaatggaaagtgggtaaaagcaccatctaaagcacttgttttaggagatattattaagttttccagtggtgatcgtattggggctgatgtgcgtcttgttgaggcatcaagtttatatattgaagagtctgctttgacaggggagtccgtacctgtacaaaagaaggtagaagcattgcaagggcaagatgttgcaattggggatcaaaaaaatatggcttttatggggacaatgattacgcgaggatctggtacaggagttgttgtagcaactggtatgaatacagcgatggggcaaattgcaaatatgttgcaaaatgcagagcaaatggaaacgccactgcaaagaaggttagaacagctcggaaaaatattaattattgtagctcttattttgacagcgctcgttgtattggctggtgtgtatcaagggaatgaagtatatcatatgtttttagctggcgtatcgctagctgttgcggctattccagaaggattgccagcaattgttacagtagctttatcacttggtgtacagcgtatgataaaaaagagagcaattgtaaggaagttaccggccgtagaaacgttaggctgcgcttctgttatatgctctgataaaacgggaacaatgacgcaaaacaaaatgatggtaacacatatgtggtcaggcggagaattgtggaaagtgacagggcaaggatatgaacctaatggctcttttatgaaaggtgaaaaagaagtgaatccagctaagacaaaatcactttatcagctacttacatttggttcactatgtaacaatgcaaatattattcaaaagaaaaaggcgtacgtattagatggagatccgacagagggagcgcttgtagctgcagcaatgaaagctgggataacacgtgaggcattaaaagggaaatttaaaattattcgtgaattcccctttgattcaactcgaaaaatgatgagtgttattgtacgagatcgagaggggaaaaagtttattgttacgaaaggagcaccggatgttcttttgcaactgagtcaaacaatcttatggggggataagcagcagccgttaagtgagctatatagaaaagaagtacaggcggctattcatagcttaggtagtcaagcgcttcgaacaattgcagttgcgtttaaacctttaaaagtcacggattctattgaacatgaaagagacgttgaaaaagattttatgttggttggaatacaaggtatgattgacccgccaaggccagaagtggcgcaggcggtaaaagagtgtaaagaagctggtattcgaacagtaatgattacaggtgatcataaagtgacagcaatggcgattgctgaacaattaggagttttaccaccagatggacgcgttgttgaaggagtagaactcgcgaatatggatgtggaggaattagaaaatgttgtagaagatacgtatgtattcgctcgtgtatcacctgagcataaattgaaaattgttaaggcactgcaaaatcaaggacatatagtagcgatgacaggtgatggagtgaacgatgctccagcgataaaaacagcggatattgggatagcgatgggaattacagggacagatgttgcgaaagaagcctcttcacttgttttactagacgataattttgctacaattaaatcagcaattaaagaaggaagaaatatatatgagaacatacgtaagttcattcgctacttattggcgtcaaatgttggagaaattttagttatgttatttgcgatgttacttgcattaccactgccgatggttcctattcaaattttatgggtgaacttagttactgatggtttaccagcgatggcattaggtttggataaggctgaaggagatgtgatgaagagaacaccgcgtcacccgaaagaaggggtattcgctagagggcttgcgtggaaaataataagtcgagggtttttaattggagcagtgacgttagtggcgtttattattgcgtataaccaacatccaaatgaactgaaatatgcacaaactgtagcgttcgcgacgttggtacttgctcagcttattcatgtatttgattgtcgtagtgagcattctgtctttcaccgtaatccatttgggaacgtgtatttagtaggggcggttattatttcgttactactcatgctagtggttatatattatccaccgttacaaccaatctttagcacaatgccgatacaagcaagagattggttattaattggaggtttgtcatcaattccgactttcttactagtaggttctttattaacagggaaaaaggctaagaagaaaaagccgatattatataagaagggattaaacttgaaatagtcaatgttatgaaaatgtgatataatttacagaaggtagtagagccttgtctctattacctttttcattgagttattttatggcttggatgtgataaaaatgatttctagtatgacagggtttggaagatcgaaagtagaaagtgatacttttcaaattacagtagaaatgaaatcggtgaaccaccgttttttagagatgagtattcgacttcctaagcaaatgatggtatttgaggacaaaattcgtaaaataattgcacagcaagttcgacgtggacgcattgaagtgtctattagtatagcgggtgaaggacttgttgaaagaaaattaagtgtgaattggtcacttcttgagcagtaccaatcgatgatggaagatataaaagggaaatttcaattacaagattctattacacttcagcaattaatggcaatgccagaagtaacagcaattgaagaaatagaaaatgtaaatgagcattttgagaacagtttatatgaggctgttcgtcaagctgctcatatgttgaaaacgatgagagatggcgaaggagaacgattacataaagatatagcgtatcgtttacaagagattagcaattgtgtaaatgcaattattccacatgcaccaattgttacacaaaaatatcgtgaacgattagaaaatcgcttaaaagaattacataatcaagatctagatgaacaaagattgctaacagaagtcgcaatctttgcagagcgttgtgatattcatgaagagttagttcgtttgcaaagtcatttagagcaatttcgtgaaacattgcagattgaagagcctgttggaaggaaaatggatttcatcgtgcaagagatgcatagagaaattaatacgattggttctaaggcaaatgacttaacaatttcaaaatatgttgtagaaatgaaaaataaccttgaaaaaattcgtgaacaagtacaaaatattgagtagctttcaaaaaatatataaagttatacgtggtggagaaatcggatagacttactaggaggcgcaaactatggccatgcggtttttaaatattggatacggaaatattgtatctgctcatcgaattattgctattgtaagtccggagtcagctcctattaaacgaacagtacaggaagcacgcgaacataatgctttgcttgatgctacgtatgggagaaaaacaagggcggttattgttatggatgatgggcatgttgtattaagtccaattcaaccagagacgattgcacatcgtttgaataataaagaagatttaagtgaggaagggtaggttttacatatttatgagaagtagaagaggattgctcatcgttctttcagggccttctggggttggaaaagggacggttcgtaaagagctgtttagccatgaggatacacgttttcagtactctatttcagtaacgacacgtaagccgcgtgaaggtgaagtagatggtgtggattatttctttaaagaaagagaagaattcgaggaaatgattcgtaatgaaaaattacttgagtgggctgagttcgtaggtaattattacggaacaccgattgactatgttgaaaaaacattacaagaaggaaaagatgtattcttagaaattgaagtgcaaggagcaattcaagttaagaaagctttcccagaaggtgtatttattttcttagcacctccaagtttatctgaactaaagagccgtattgtcggacgtggtacagagactgaagatgttattgaaaatcgtttaactgtagcgaaagaagaaatcgagatgatggacgcttacgactatgtagtagaaaacgatcaagttgaattagcttgtgatagaattaaagcaattgtggttggcgaacattgccgccgcgaaagggtagcaaaatattataaagaaatgacggagggtctataattatgttaaatccatcaattgactcattactacaaaaaatcgattctaagtacacattagtaacagtagctgcaaaacgcgcgcgtgaaatgcaacttgctaataactgtgttgtagaaaaacctgtttctcataaatgtgtaggtaaagcattagaagaaatcgatgcagaagcattaagctacgtaccaagtgaagataaagtagctgaataagcctttgccttcgacaaaataaaacatagactttataattttctatgtaacggtaacaacctatttacaagtaggttgttatttttttacgaaaggaatgaaatattggtactgacgagctgagaattctatttcagtattataagtttgaaaaagaaagaggacgagtcatatgctaaaagggaaaaagatacttctatgtgtaacaggaggcattgcggtttttaaagcagctgcgttaacgagtaaattgacacaatctggcgcgattgtaaaagtaatgatgagtgagtcggcaatgaagtttgttacgcctcttacattccaagcgctttctcgccatgatgtatatacggatacatttgatgagaaagactcagctgttattgctcatattgatttagcagattgggcggatgttgtacttgtcgcacctgctactgccaattgtattggaaagttagctggtggtattgcagatgatatgattacaactactttgttagctactacagctccggtatggattgcgcctgctatgaatgtgcatatgtatgaaaataaaatagttcaaaaaaatatgatgacattgaaaacgctaggatatacatttattgagcctggggaaggctttttagcatgtggatatgtggcgaagggacgactagaagaacctgaagcaattattgcacggttagaggaagctttctcagaacacaaaccattgcagggaaaaagaatattaataactgctggcccaacacgtgaaaaggttgatccagttcgttttatgacaaatttttcttctggaaaaatggggtatgcgattgcggaagtggcagcgaatttaggcgctgatgttatactcgtttcaggaccgacagcattaaatacaccgttacatgtaacgacagtgcaagtggaatctgcacaagatatgttagaagcggttcttcaacattatcaaaacgtagacgttgtcattaaaacagcagcagttgcagattatcgtccgaaatatgttcatgagaataaaatgaaaaagcaaaatggtgatgctgtcattgaacttgaaagaacggtggatattttaaaaacgttaggtcagaaaaaggataaacagttacttatcggttttgctgctgaaacgacaaatgtagaggaatatgcaacgaaaaaactacgtgagaaaaatgcagatatgattgtcgcgaatgatgtaaaagcgcaaggagctggatttggcacggatacgaatattgtaacaatgtatagaaaagatggaaaagttattgagttgccaattttaatgaaaaaagaggtagctcgtgaaatattgaagcaaattgaaatgatgttagaagatgatcgtttatgaaatttgcaagtgtaattgttgatgtacctgcccgtcagacagatcgaccatttgattacattatccctaaaaaatgggaagatattgtacagacaggaatgcgtgtagtagttccgtttggcccaagaaaattgcaaggttttattattgggattaaagattcggtggatgtagaaagtaagaagttaaagacaatccatgaaatattagatgtaacaccggttttaaatgatgaattattaaagcttggatattggcttacaagtgaaacgttatgctacatgatttcagcttttcaagtgatgcttccaactgcgataaaagcaacgtataaaaaacgtctacaactttgtaaacaggaagaaatagcacctgaaatactatatttatttcaggataaagaagcaattgattttgaagtaatcgagcaacagccacatttataccgaactattcaacaagaaattaaaaatggtacggttgaagtcgtttatcaagtgaaagataaagtacaaaagaagaagcaaagagtggttcagccggagttgccagaagataaattggaattagcggcatttgaactgaaaagtaaaaaacaacaagatgtactttattattttgtggaaaattataaaagtgcaccgttgaaagtaattacagaagagttacaaataacagatgctccaataaaagcacttgttaaaaagggattcatttcagaaaagtatgtggaagtataccgaaatccgtatgacgatgatgattttgaacaaacaaaaccatttccacttacggaggaacaaaaacaagttattacaccgattttatcatcaattacaaatgaaacttataatccatttttactatatggtgttacaggaagtggaaagacagaagtatatttacaatctatagcagcagtgctcaagaaaggaaaagaagctatcgttcttgttcctgaaattgcactaacgccccaaatggtggatcgttttaaaggtaggtttggctcacaagttgcagttcttcatagtgcgttgtctgttggagaaaagtatgacgagtggcgtaagattttaagaaaagaagtgaaagttgtagttggtgcgcgttcagctgtttttgcgccttttgagaatttagggattattattattgatgaagagcatgaatcaagttacaaacaagaagataatccgaggtatcatgcaagagatgtagctgtctggagaggacaatatcataaatgtcctatcgttcttggtagtgcgacaccaacacttgaatcgtttgcaagggcgaaaaaaggtgtttatgaactattaacaatggaaaaacgtatgaatgaacaagctttaccaacggtagagattgttgacatgcgagaagaacttcgtgacgggaatcgatcaatgttttctaaggcgctgcatgaaaaaatagcagatcgattagaaaagaaagaacaaatggtactctttttaaatagaagaggtcattctacatttgttatgtgccgtgattgtgggtatgttgttcaatgtccgcattgtgatatttcattgacatatcataaaatgaatcatcgtttaaaatgtcattattgtagttacgaagagaatatgccaactgagtgtccagcttgtcaaagtacatacattcgtttctttggtacaggtacacaaaaggtagaagaagaaattacaaaactatttccagaggcacgagtcattcgaatggatgtagatacgacaagtcgaaaaggaatgcatgaaaaattattaaaggcgttcggggaagaaaaagcagatatattactcggaacacaaatgattgctaaaggattagattttccgaaagtaacgctcgttggggtgttaactgcagatacgatgcttcacttacctgattttcgggcgagtgaaaagacatatcagctattgacgcaagtaagtggacgagcgggtagacatgaattgccaggggaagttgtgattcaaacgtatacgccagaacattacagtatagagttagcgaagaaccaacaatatgatgtgttttttgaccaagaaatgcaaatgagacgaacaagacaatatcccccatattactatgttgtactcgtaactgtatctcatcctgaattattaaaagcggtacaagtgacggaaaaaattgcctcgtatttacgaacgcattgctcacagcaaacaatggtgctaggaccagttgcttcagcgattccaaggataaaagatagatatcgttatcaatgcatgataaaatacaaacgggaaccaaacttaaagaacgtgctcaaaatggtaaatgaacattatcaagcagaaatgcaaaaagagctacaaatctcaattgattttaatccaacaatgttaatgtagcggagggaaatatggcagttttagaaataataaagcatccaaatgaagtgttagaaacaccatgcgaaagagtaattaactttgataaaaagttagtgaaattgttgaaagatatgcatgaaacaatgttaattgcggacggagtcggtttagctgcgcctcaagtaggtgtaagcttgcaagtagcggttgttgatgtcgatgatgatactgggaaaatcgagttaatcaatccatcaatattagaaaaacgtggtgaacaagtaggtcccgaaggctgtttaagcttcccgggactttatggtgaagtagaacgtgccgattatattaaagtaagagcgcaaaatcgccgtgggaaagtattcttattagaagcggaaggatttttagcgcgtgcaattcaacatgaaattgatcatttacacggtgttttatttacatcgaaagtgacaagatattatgaagaaaacgaactagaataggtgttaaaaggagcggtttttaaatgataaaagtagtgtttatgggaacaccggacttttcagtgccggtgcttcgtcgtcttattgaagatggctatgaggtagtaggtgttgtgacgcaacctgatcgtccagtaggtagaaaaaaagtattaacacctacacctgttaaagttgaagcggaaaaacatggtatccctgtgttacagccgttaaaaattcgtgaaaaagatgaatatgaaaaagtattggcattagagccagatttaattgtaacagctgcatttgggcagattgtaccaaatgaaattttagaagcaccgaagtatggatgtattaatgttcacgcttctttacttcctgaacttcgtggtggtgcaccaattcattatgcaattatggaaggtaaagaaaaaacaggtattacaattatgtatatggtagaaaaattggatgctggtgatatcttaacgcaagtggaagttgaaattgaagagcgtgaaacgacaggctcattatttgataaattaagtgaagcaggagcacaccttctatctaaaacagtacctttattaatccaaggtaagttagaaccgattaaacaaaacgaagaagaagtaacgtttgcgtacaatataaaacgtgagcaagagaaaattgattggacaaaaacaggtgaagaagtatacaatcacattcgcggattgaatccatggccagttgcttatacaactttagcgggacaagttgttaaagtatggtggggagaaaaagtgcctataactgaaccggctgaagcaggtacgattgttgcaatcgaagaagatggttttgttgtagcaacgagtaatgaaacaggtgttaaaattactgaattgcaaccttctggtaaaaagcgtatgagttgttcacaatttttacgtggaacaaaacctgaaattggaacgaagttaggagaaaatgcatgagacaaaatgttcgtgaattagctcttgatggtttaattcaagtggaaaaaagtggtgcatatagcaacttacttttaaataatctaattgaaaaaagtgcaattgatagaaaagatattggtttattaactgaaattgtatatggaacgattcaacgtcgtgacacattagattattatttacagccttttttaaaaaagaaggttgaggcgtgggtaagagtattgcttcgcttatctttatatcaaatgatttatttagaccgagtgccagaaagagcggctattcatgaagcggttgagattgcaaagcgtcgcgggcataaaggaattgctggtatggtgaacggtgtattacgttcgattcagagagaaggtgtaccttctgtagatgaaatcaaggatccagtagaacgtcttgcaattacaacaagtcatccagtttggcttgtccaagagtggacttcagaatacggtttagaaactgcagaaaaaatgtgcgaagtaaacatgttaccccctgtaccaacagcgcgtgtgaatgttgataaggtaacggtagaagaagcgattgagttgttggcaagtgaaggtatagaagcaaaaagtggtgacttatcagatgatgcaattcagattgaaagaggaaatgtagcgcatacagaagcgtttaaaaaaggatttctttctattcaagatgaaagttctatgcttgtagcacgcgctttagaaccgaatacgggagatgcagttcttgatagttgtgctgctccaggcggaaaaacaacgcatatcgcggaacgattaaagggaactggtaaggtcatgtcccttgatttacatgcacacaaagtacgtttaattaaacagcaagcagagcgacttggtctagaaaatgtcgaaactaaagcgctagatgctagaaaagtgcaagagcactttgcaaatgaaacgtttgataaaatattggtagatgcaccgtgttctggatttggtgtaattagacgtaagcctgatattaagttaggaaaagataaaggcgatagtgaaagattatcgacgattcaaattgcaatactagaaaaaatagcaccattattaaaacaaggcggtcgtcttgtttatagtacgtgcacaattgagaaaatagaaaatgaacaagtaatagagaaatttttacaagaacatcctgaatttgaatgggatactacgcttaaagagcgtatgccagaaaaattaactccgtatattgatgaaggtcaagtacaaattttaccgcattattttgcgacggatggcttttatattgcttgtttaaggaagaaggtgtagcatcatggaaacgactgtaagaaaacaaaagaaaaatttagaaacgaagaaaccatcaatttactctttacaacttcatgaaatgcaagattggttaaaggaacaaggagaaccgaagttccgtgctggacaaatttttgattggttatataaaaaacgtgtaaaaaattatgaggatatgtcaaacctttctaaaggattgcgtgataaattgtcgaattcctttgatattactactttaaacacgttagtaaaacaaacgtcttcggatggaacaattaaattcttattccaattatatgacggatattctattgaaacggtattaatgcgacacgaatatggaaattccatttgtgtaacaacgcaagttggttgtcgtattgggtgtacgttctgtgcttcgacacttggtggattaaagcgaaacctagaagctggagaaatcgtagcgcaagtagtagaagttcagcgtgcgcttgatgaaacggaagaacgtgtaagttctcttgttgttatggggattggagaaccatttgataactatgataatttaatgggattcttacgcatcattaaccatgaaaaaggacttcatattggtgcgagacatatgactgtttcgacgagtggaattatcccgaaaatttataagtttgctgaagaagatctacaaattaattttgcgatttcattgcatgctccaaactcagaattacgttcaaaattaatgccgattaaccgtgcttataaattaccagatttaatggaagctattaaatactatgtaaatagaacagggcgtcgtattacttttgaatatggattatttggaggagaaaatgaccaagtagagcatgctgaagagcttgctgcgctcttaaaaggtgtaaaatgtcatgtgaacttgattccggtaaactacgtacctgaacgtgattatgtacgtacgccacgtgaacaaattttcttgttcgagaaaacgttaaaagatcgtggagtgaatgtaacgattcgccgtgaacaaggtcatgatattgatgcagcctgcggtcagttgcgtgcgaaggagcgcaaagaagagacgaggtgacgagatgaaagccgtatttctatcggataaaggaaaagttcgtcaacataatgaagatagtgcaggagtttttcacaatttagatggaaatgtattagcggtagtagcagatggaatgggaggtcatcgagctggtgatgtagctagctcgatggccattcaattattccatgattattggaagcaaacacataatatgaatgagccgaaaaaagtagaacaatggttacatactagtgttgggattattaatgagcgtatatatgaatacgctcagcaaaatgcagaatgtaatggtatgggaacaacgcttataatagctgtttgtacaccaagctttgtgacaatagggcatataggagatagtcgttgctatatggtatcagaaggagaaatgacgctagtaacggaagatcattcacttgtaaatgagcttgtgaaacatggtgaaatttcaaaggaagacgcagagtatcatccgaaaaagaatgtgttattaagagcattaggaacagaagaaaaagttgggttagatgttaaaacgttggtgattgaggaagatgatcaattacttctttgctctgatgggttatcaaacaaagtttctattgatgatatgcgacaaattttacagttaaatgaacagcttgaaggtaaagggcagtgtctcattcaattggcaaatgatcgcggtggagaagataatatcacacttgttcttattgattatgcgggttcgacaaacgaaagtaggtgaagtgcaacgtgctgattggaaaacgcttaaatgaccgttataagctgctgaaaatgattggtggtggcggaatggccaatgtatatttagctcatgatgatatacttggccgagatgtagcggtaaaaatattaagactcgactactcaaataacgaagagtttattaaacgtttccatcgagaagcgcagtctgttacaacgttgtcgcatccaaatattgtgaatatgtatgatgtcggagaagaagatggtatatactatcttgtcatggaatatgtaccagggcaaacattgaagcaatacataattgagcgagggatgttacctataggagaagctcttgatattatggagcagttaacatccgctatggcacatgcccatcattttgaaattgtgcatcgtgatataaagccgcacaatattttaattcgagctgatggaataataaaagtaacagattttggaattgcgacagctacaagtgcaacaacaattacacatacaaattcagtgcttggttcagtccattatttatcaccagaacaggcacgtggcgggatagcaaataaacaatcagatatctattctcttggaatagttatgtttgaattgttaacaggaagacaaccgttttctggcgaatctgctgttgctatagctttaaaacatttacaaagtgaaatcccatcaccaaaaagatggaatgaaaatattccgcaaagtgttgaaaatattatattaaaggcaactgcaaaagatccgtttcaccgatatcaatctgccaatgcgatgaagcgagatattgaaactgcgctatatccagagaggataaatgagcaaccattttacataccggaagatatggaagcgacgaaagcgattccgattattcaacaagaacaattatttgaaaatgtaagtgatgaaacgattgttttaaaagggagtaaggtggaagaaccgataagagcagaagcagctgagttagataagaagaaaaaacggagtaacaagtggcttaaagttttaatttcaacatttttatttttagcaataggaataacattagcacttacggttattccaggattatttattccgaaagatgtgaaagttcctgatgtggctggtatgaaatacacgacagctgtaaatacattagtagaaaagggctttgaggtgacggagcctaatattgtatatacagatgatgttgaagttggggatgtaataaaaacggaccctgtagcaggaagagtcgtaaaagaaaacgctaaaattactatctatcaatcaggtggaaaaaagaaaagtaagatggcaaatttcacaggtcaaaactttgagagtgtaaaagctgagttagaagaaaaatataaacaagttacggtaaattatattgaaaatgataagccgaaaggtgaaattgtagaacaaattccgacgcctgatcagatggttatagaagcggagcaagaactgaaaatctgggtaagtaaagggccttatcaaattagaccaggtgacttttcggggtggactgaaaatagtgtaactggttatttgaatgagagaaaactaacgtcagatataaaacgagagtattcagatacagtcgaaaaaggacttgtaatttcgcaatttccaaaaccaggtacaccattaaaagagggagataaagtaactattattatctctgatggtcaaaagcctaaagtgactaaaacggtaaaagtggacaatatctctatcccatatgagcctgctgtaacaggtgaaaaaaagccgcaaacaatagaaatttataaagaagacatgcagcaaaaaatggatagaccggttgaaacgagaacaattactgaatcagcgactatttctttagaatttgtaattcaagaaggttcaaagggacactataaaattgtacgggatggagtaacgattattgataaagaagtaccatatccaactcaataatagtgaaagtctacttattattattgcctgttatgctgtctacaaagtggacggtatagcaggcaaaaatatatgattcaaaaagctagtaaagtgatgcagctgtaaatatttttttgcatttaatgggaaattcaatgtatattagcgaaagtatatatggtaggttttgaaatcgttatttggaaaatttaaatccattcatttttaaattcagcatcaccttatacaaaaaaggagaattctatgccagaaggaaaaattataaaagctttaagtgggttttattacgtgcagcatgaagaaggggttacgcaatgtcgtgggcgaggtgtatttagaaaaaataaaattacaccacttgtaggagaccaagttgtttttcaggcagataatccaactgaaggttatgtgcttgaagtgtttgatcgaaaaaatgaacttgttagacctcctattgctaatgtcgatcaagcgatccttgtgttctctgcagtagaaccagattttaatcctggactgttagatcgatttttagtgctgattgaatatcataacattaagccaattatttgtattagcaagatggatttagtagatgaaaagatgaaagcaactgttgaagcttatgcgaatgattatcgtgagatgggttatgatgttttatttacttctattaatacttcagaaagtattgatatattaaaaccatacttagaaaattgtgtttctgtcgttgcgggccaatctggtgttgggaaatcttcaatgcttaatgtgctacgtccagaattagagctgaaaacaaatgatatttcttcccatttaggacgcgggaagcatacgacaagacacgtagaattaattgcaattgggagtggactagtagcagatacaccgggttttagttcactagatttcattgatatagaagtagaagatcttacatattgttttccagagttgaaagaagcgagccaatactgtaaatttagagggtgtacacatctttctgaaccgaaatgtgcggtgaaagctgcggttgaagaagggaagattacagaatatcgctataagaactataaacaattcgtagaagaaattagagagagaaagccgaggtattagttatgattaaaattgcaccatcgattttatcagcagatttttcaaaattaggggaagagattaaagatgtagaaaagggcggagcggattacattcacgttgacgtaatggatggacatttcgtaccaaatattacgattggaccgttaattgtagaagcaatccgtccgattacatcattaccattagatgtacatttaatgattgaaaatcctgataactatatcccgactttcgcacaagcgggagcggatattattactgttcacgtagaggcgtgtccgcatctacatcgtacaattcagttaattaaatctcatggtattaaagcgggcgttgtattaaatccacatacgccagtttcagtgattgagcatgtattagaagatatagatatggtattacttatgacagtaaaccctggatttggtggacagaagtttatccattctgtattaccgaaaattaaacaagttgcagacatggtgaaagagcgcaatctagaagtggaaattgaagttgatggtggtgtaaatgctgaaacagcaagactttgtgtggaagcaggagcaaatgtacttgtagctgggtcagcagtatacaatcaaaaagaccgcggtgaagcaattcgcgtaattcgtgggtagtgatgaacttttatcctagtaaggcatttataggataggataaaaatatgtaaaaaggcaatctaccgaatggcagattgcctttttacaatggaaggagaagaaaaaatgattattcatattttggcaggaggaccttcggaatattgcgcagattttgctcgatacgagaatgaggaagtagtgtgggcagcggttgataggggagtataccgtctattaaagaaagggattaccccggctgttgcgtttggagattacgattcagttactgaagaagaattagtatggatgggacagcaaacgaacgaattacatattgttccgcgggaaaaagatcaaacggatttagaaattgcaatcaactgggcattagaacagaagccgacactaattcgtatttttggtgctactggtggaaggcttgatcacggtttggcaaatatacagatgcttttaaaagggttagaagtagagatagaaatgtgtattgtggacaataaaaatgaaataacagttaaaaaaatgggtacacatataattgaagaaaataaaaattttccttatgtatcttttgtaccagttactgaaatagtggaagggattacattgtttggttttaagtaccctcttactaataaaacaatagagtggggatcaacactttgtattagtaacgaactcgttgaggaaaaaggtactttttcatttacttctggcatattaatgttgataagaagcactgattgaagaaacaattttgctccttacatcatatagtgaccaagtggagtaatggggattaggagggaaaccatgagattttatacaattaagttacctaaatttcttggtggaatagttcgtgcaatgttaaataccttcaaaaaagattaaaaaaagcacctatcaccggtgctttttccattgttatagtaaaaaaagagcctatcggctcttttttttattattaaacacgttcgattttgccagattttaatgctctagcagaaacgtaaacacgttgaacttttccgtcgatgcgtacgcgaactttttgaaggttagcgccccacttacgttttgtagcgttcattgcgtgagaacgagagttaccagaacgagcttttcttccagtaatagcacaaacacgagccatttatatttccctcccttgataccttaccatacgtaatttttcaatgttagtcttttatgcgatgctaaaaacactactataatttaacacaactaaaaagagaatgcaacaccgtagaaaaaagaaatcaagaaaatttacttgacactatatgtcaatgaagaaaagttgaaatccataaaaattgcttgacatattatagtggtacatgttgtataataacaatggactattttgctcatcataaaaaagtgtaatttaaaacataaaatatgagagtgaaaagaaagaacgatggaattttctttaaaaagattatatgatagtaactaaagtagtctagctcactttcaccatttatgaagggggaaacgagatgtcaattgaaattaaaacgaagtacggtcaaattgatattagtacagatgtaattgcaacaattgctggaggtgccgcggtagattgctacggtatcgtaggtatggcatcaaaaaatcagttaaaagatggattaacagacattttacgaaaagaaaacttcactagaggtgttattgttcgtaaagatgaagatgaagtacatattgatatgtatattattgtgagctatggtacgaaaatttcagaagtggcacataatgtgcagacgaaagtgaaatatacattagatcaaactgtaggactagcagtagattctgtaaacatctacgtacaaggagttaaagtaataaacttgtaatgtgcattaaggaggaaaatctgtgtcaattcaaaaaattgatggaaaacgtttatcacaaatgatcatgcaaggagcgaataatttaacaaacaatgttcagcttgttgatgcattaaacgtatttccagttccagatggcgataccggtacaaacatgaacttatctatgacttcaggtgcgcgtgaagtgaaagcaaacccttcacagcatgctggtaaagtcggcgtaagtttagccaaaggattattaatgggagctcgtggtaactctggagttattttatctcagttgttccgtggtttctctaaatccattgaacaaaaagaagaattaacaacagttgattttgctgcagcactagaagctggagtagaggcggcttataaagcggttatgaaaccgattgaaggaacgattttaacggttgcaagagaaacgggtaaatatgcagtaacagttgcgaaaaaacagcgcgactttgttttgtttatggaagacgttgtgaaagaagcaaacgcatcgttaaatcgtacgccagatttattacctgtattaaaacaagttggcgttgtagatagcggtggtaaaggtcttgtagtggtatacgaaggatttttagctgacttaaaaggagaaacgatttcttctgatgcaccgacgcaaccatctatgaatgaaatggtacgcgcagaacatcaccgtagtgtacaaagccaattgagtacagaagatattaagtatggatattgtacggagttcatggtgaaattagaggctgaaaaggtgaaagagcataatttctctgaacaaaaattccgtgaagatattagtgtatatggtgattctctactagttgtgtctgatgatgaaattgtaaaagttcatatccatgcagaacatcctggagacgctatgaactacgggcaaaaatacggtagtttaattaagattaaagtagaaaatatgcgtgaacagcatactgctttattagatgaacctactatggttcctgaacaaccagctcaatcgaaagaaaaacaaccatatggtatcgtaactgtagctatggggtctggtattaaaactttatttgagagcatcggcgcaacgaaagttatcgaaggtggtcaaacgatgaatccaagtacggaggatatcgtgaaggcaattgaagaagcaaatgctgaaaaaatcattattttaccgaataacggaaatattgtaatggcagcagaacaagcggcatcagttgtagatcaagaagttattgttgttcgttcgaaaacagttcctcaaggtatggcagcaatgttagcatttaacccagttggaacgttagaagagaatgaagaaaacatgcaagaagctttatctcatgtgaaaacaggtcaaattacgtatgctgtacgtgatacggaaattgatggtgtagcaattcaaaaagatgatttcatgtgtattgcagatgggaaaattgtatctacaaatgctgaaaaagtaggagctgcgaagcaattactagaagcgcttattgatgaagattctgaaatcgtaacgattctacaaggtgaagatgcaactgacgaagaagtagcggagttagttgaatttgtagaagagaaatttgaagatgcagaagtagaagtgcatgctggaaaccaaccagtgtattctttcatcttctctgtagaataagataagattcgttttgaaaataaatggattacttacttgctaatggataagaagtagtaatatgaaggttattactagtttttattcaaaaggctagcatattgaagagagaaaagagccttgctgctaatagtgaggctcttttttacttgttttatataagggatttgagtagtttctcttagaatgcctatgatagaatatataaggtgaaagagagcgattacagatgctaattggtactcaaataaaatgcaataaagaaaataatgtgacggggtgtgagaatcttgaatgatgttgtacaagttcctgttacggatgtaaaggggataggaggagaaacatctgagttactacatgagatgggtatttatacagtttctcatctattagaacattttccgtaccgttatgaagattatgcgatgaaagatcttgctgaagtaaagcatgatgaacgtgtaacggttgaagggaagattcatagtgctcctttgctgcaatattatggtaagaagaaatcgcgtttaacagttcgtgttctcgtcggtcgttatttaattacggcggtatgttttaataggccttactataagcaaaaattaaagttagatgaaacggtaacgattactggtaaatgggatcaacatcgtcaaacaattgctgtatcagaacttcattttgggccggttgtacgtcaacaagaagtggaacctgtttattcagtaaaggggaaacttacagtaaaacagatgcgtcgttttattgctcaagcgttaaaggaatatggagattctatagtcgaagtgttaccggatggtttgttagggcgatataaattattaccaagatatgaagcgcttagggcattgcattttccggtaggacaggaagatttgaagcaagcgcgtcgccgttttgtatatgaagaatttttcttatttcagctgaaaatgcaaacgctccggaaaatggagagggaaaattcaaaagggacgaagaaagagattccgtcagtagaattacaagaatttatcgatgcactgccgtttccattaacgggtgcgcagcaccgagttgtagatgaaattttgaaagatatgacatctccttatcggatgaaccgactattgcaaggtgacgttggttctgggaaaacagttgttgctgcgattggcctttatgcatcgaaattagctcattatcaaggtgctttaatggttcctacagaaattttagctgagcaacattatcagtcgcttgctgaaacgttttcgcattttggtatgaaggtggaactgttaacaagttctgttaaaggtgcgagacgtcgagaaattttagcgaagttagaacaaggagaaatagatattcttgttggaacgcatgccttaattcaagatgaagttatatttcataggttgggtctcgttattacagatgaacagcatcgatttggtgtagcgcagcgccgagttttacgggagaaaggtgaaagtccagatgtattatttatgacagcgacaccaattccgcgtacgcttgcaattactgcatttggagagatggatgtttcgataatcgatgagatgccagcaggtagaaaggtgattgaaacatattgggcaaaacatgatatgttagatcgcgttctcggttttgttgaaaaggagataaaaaaaggaagacaggcatacgttatttgtcctctaattgaagaatctgagaaacttgatgtgcaaaatgctatcgacttacatagtatgctgacgcatcattaccaagggaaatgccaagttggattgatgcatgggagattatcgtctcaggaaaaagaagagataatgggacagtttagtgaaaataaagtgcaaattcttgtatcgacaacagttgttgaagtaggtgtgaacgtaccgaatgcgactgtaatggttatttatgatgcagaacgtttcggtttatcgcagcttcatcagcttagagggcgtgtcggccgtggtagtgagcaatcatattgtttattaatagcagaccctaaatcagaaacagggaaagaaagaatgcgcataatgactgaaacaaatgatggatttgtattgtcagaaaaagatttagaattacgaggtcctggagatttctttgggagtaagcaaagtggcttaccagaatttaaggttgctgacatggtacatgattatcgagcgttagaaacagcaaggcaagatgcggcgatactagtagattcagaagcgttttggcacaatgatcagtacgctgccttgcgtacgtatcttgatgggacaggggtgttccaaggagagaagctcgattaaagggagtcaacaaaattttttgttgcattctacttttaatgattatatactactgttagtacctagtcataaaaatggatggtgcggtatgaaaaaaagaagaagtaaaaaagaaagacaagagttattacaacaaacaatcgaatcaaatccttttattacggatgaagatttagcggaaaaatttcaagtgagtatacaaacagtacgacttgatcgtatggaattgtctattcctgaattaagagagagaattaaacatgtagctacaaagcaacatgaagaagatgtgaaatctttaccgttagaagaggttgttggagaaattattgatattgaattagatagacatgcaatctctatctttgaagtaaaggtagaacatgtatttaaaagaaatcaaattgcccgtgggcatcatctgtttgcgcaagcaaactcactagctgttgcagttattgatgaagaattagctttaactgcaaagtctaccattcgatacattcgccctgtaaaattaggagagcgtgttgttgcaaaagcgcgcgttgaagatgtagagaatgataagggacggacggttgtcaaagtgcgtagcttcgttggagaagaacttgtttttacaggcacttttgaaatgtatcgatctagtaattatagtgaggaaggtaacaacttatgaaaatcgcaatagatgcaatgggcggagatcacgctccaaaggctgtagtattaggggcaatgaaagctattaaggaatattctgatttacatattacgttagtagggaaagaagaggaaattcgtcaatacttaacgagtgatgaacgaattactattcttcatacagacgaaaaaatagaatcaacggaggaaccagtaagagcggttcgtcgaaaaaaacaagcttcaatggtgcttgcggcacaacaagtaaaggatggagaagcagacgcttgtatatccgcaggtagtacaggagctttaatggcagctggattatttgttgtcggtcgtatggaaggaattgagcgaccagctttatcgcctacaatgccaactgtagatggaaaaggttttgttatgttagatgttggagcaaatgttgatgcaaaaccaattcatttatatcaatatgcagtaatgggatctgtttatgctgagaaggtaagaggaattgaaaatcctcgcgttggactattaaacgttggaacagaggatggaaaaggaaacgagctttcaaagcaagtatttgcaatgcttaaagatgcgccaattaatttcgttgggaacattgaatcaagagatttattgcaaggtgtagcagatgttgttgtatgtgatggttttacagggaatgtagcgttgaaatcattagagggaacagcacttgcgctattctctatgttgaaagaacaattaatgagttcatttacgagtaaattagcagcggcggtattaaagccaaaacttatggtattaaaagataaaatggattattcggagtatggaggagctgcattatttggattgaaagcacctgtcattaaggctcacggttcttctaatgaccagtcgatatttagtgcgattcgtcaaacgagagaaatggtagcgaaagaagtaattcctacgatttcaagcgtaatggagaaagagtcactccaataagaggaggatttgaaatgggaaaaatagcatttctttttccgggccaaggttcacaggcagttggaatgggtaaacaattagcagagaataataaagaggttgcaaaagtgtttgcaaaagcagatgaggtgttgcaagattcactttcagaagtgatttttgaaggaccgcaggaaaagcttacattaacaacaaatgcgcagcctgcattattaacaacgagttttgctattttgacagctttgaaagagtatgacattacacctgactttgtcgctggtcatagtttaggtgaatatagcgctcttgtagcagctggtgcattaacttttgaagatgcggtatatgctgtaaggaaacgcggggaatatatggaagaagctgttccgggcagggaaggtgcaatggcagctatattaggtgctgacccacatatgctgaaacaagttacagaagaagtaacaagtgaaggatatgcagtgcaaatcgctaatatgaatagtacgaagcaaattgtaatttctggaacgaagcaaggcgtagaggttgcttctcaaagagcgaaagaaaatggtgcaaagagagcaattccactaaaagtaagtgggccattccattcttcacttatgaagccggcagctgagaagtttcaaagtgttttgaatgaaattacaattcatgatacgaacattcctgttattgcaaatgttacggcggatgttattacacgtggtgccgacattcaagaaaagttaatcgaacagctttattcgcctgtattatggtacccgtctattgaatgtatggtgaagcagggagtagatacatttattgaaattgggcctggaaaagtacttgctggacttatgaagtcaattgattcatcagcgaaagcatatgcgatatatgatgaagagacattaaaagataccatttcaaatttgagaggagaaaactgatgttaaaagggaaggtagcattagtaactggcgcttcacgtggaattggtcgcgcgattgcgatcgatttagcgaaacaaggggcaaatgtagtagtaaattatgcaggtaatgaacaaaaagcaaatgaagtagtagatgaaattaagaaattaggttctgatgcaattgcggtaaaagcagatgttgcaaatgctgatgatgttacaaatatggtgaaacaaacagtagatacatttggacaagttgatattcttgtaaataatgctggtgtaacaaaagataatttattaatgcgtatgaaagaagaagaatgggatacagttattaatacaaacttaaaaggtgtattcttatgtacaaaagcagtatctcgttatatgatgcgtcaacgtcacggtagaattataaatatcgcttctgttgtgggtgttataggaaacccagggcaagctaattatgttgctgctaaagcgggtgttattggattaacaaaaacatctgcaaaagagttagcaagtcgaaatattactgtgaatgcaattgcgccgggctttattgcgactgatatgacggatgtactagatgagaatattaaagctgaaatgttaaaagttattccagctgctcaatttggtgaagcgaaagatatcgcgaatgctgtaacgttttttgcttctgatcaaagcaaatatgttacaggtcaaacgttaaatgttgatggcggtatggtaatgtaataaaagaatcgatttcacctagtttttttggtcaatatttaatataatatttgaggggaggtgaatggaatggcagatgttttagagcgcgtaacaaaaatcatcgttgatcgtttaggagtagaagagactgaggtagtaccagctgcaagcttcaaggaagatttaggagcagactccctagatgtagtagaacttgtaatgcaattagaagatgaattcgaaatggaaatttctgatgaagatgctgaaaagattgctactgttggcgatgctgtgacttacatagagagtcatctataatgcttaagtgaagtcccgttttttagcggggctttctggcttatatctggagggacctatgccgtaccgaaaatatagagaaaaaaaatacgaaacaaaatatcgtgaagcatttaaagtgtttcaagaaaagataggtattacgtttacagatgaaaaattattgattcaagcatttacgcattcatcgtatgtgaatgagcatcgaaaaaaaccgcatgaagataatgagcgtcttgaatttcttggagatgcagtattggaactgactgtatcacagtatctgtttcaaaaatatccgacaatgagcgaaggagagttaacaaaactacgtgcagctattgtatgtgagccatctcttgttcgttttgcgaacgaattgtcatttggcagccttgttttattaggaaaaggtgaagaaatgacaggtggacgtgaacgaccagctttattagcggatgtctttgaagcgtttattggtgccctttatcttgatcaagggctagaaacagtttgggaattcttaaaagaaattgtatatccgaaaattaatgagggtgctttttctcatgtgatggattataagagtcagttgcaagaattgattcagcgtgatggcagtggcaatgttgagtatcaaattttgcaagaaaaaggaccagctcacaatcgagaatttgtgtcacgtgttacgttaaataacgtagctttaggtcttggtagtggtaagtcgaaaaaagaagcagagcaacaagctgctgcagaagcattgaaaaaattaaaagaacaactataaggaatccccctttgaatgagggggattccttatgcatagaatgaaactttctttttgtttataaagaaaaagaaggtaaatccgtataatacttgtttttatatagagaacatttataacggcggagaataggaggaaggcctttcgtgtttttaaaaagattagaaatagcagggtttaagtcttttgctgagcgtgtatctgttgattttgtcccaggtgtaacttctgtagtaggacctaatggaagcgggaaaagtaatattactgatgcaattcgctgggtacttggtgaacaatctgcaaaatcattacgtggtgcaaagatggaggatattatttttgcaggcagtgatacgaggagagcggttaatgttgctgaagtaacaataactttaaataatgaagatcaacgtttaccaattgaatacaatgaggtgtgtgtaacacgtcgtgtatctcgttcaggtgatagtgatttttatattaataaacaatcatgtagattgaaagatattatcgatttatttatggactctggtatgggaagagaagctttttcaattattagccaggggaaagtggaagagattttaagtagtaagtcaggcgcgacacgtttctctataagcgtttagacgtgaagtgagagtgttgctgaaagattttgtacatgcttaaacaagcgaaaatgtacatgtttatcttgacatttacagagttactcatttttctatcactcctttcatttcgtcctaattactataaccatttaggaggataatcatgagttagaagttaggcacttaattttcttcgataatgtaagtaaaatattccatacataacaaatagcatgagtaaaacttgtaactctacattttcctttaaaatagctgcgatagggtctggtaagtacggtgatttatcgtttgtgtttaaacctaaccatttatttaagaggctaatggtacaaaacataaaaacaccggaccagcttgccgtaattgctttttgtttaatttttgtttcacgttcatcatctgtaatccaaggattagcagttttatcccgcattaacgggcagtaagacccccacctcaaaattcagcggaggcaaagaagttaggtggggatcaactgtccgtaaaagcccgattggttcaactaataatccgtgggggatgaacaaaacccccacggattaaagtttcactttatcactactaaaaaatccatttatgtatccccatataatcattccaattaagatggttatccatttcatattttttgattcacttctcccttgtaaaaagtgttttacatatcagtttttcatatagcaggaataaagtataagatagggaagaaatatgtaagaggatttcataaagagaggaggaagaggatgaaaatcgtttttgttcggcatggtgaaggtgaacatacaacggatttaccagaaagtttacaagtgtttgacccaccattgacgagagtaggaaaggctcaagctaaattacttcaatgcaatgtgccattgcaagagacggatatattaattgttagtcctacacttagaactttgcaaacggcgacaatatggagtgcgaaagttgcttgtcaaaaactagtccatccatatgtatccccacgtatttttccttatcgagaaggagcgaaaacattaccgtgcgattatatagtagatcagggaatgataacaaagttatttccgcatttttcgatagagaaaagctcaaataatcagttatggaaggaaggtataaacactatttcagagaatagttttcagcaaatagtagatgaatttcttctttggtgttatgaactgggtgctgaaagaatttgcattgtatctcacgatggaacaattacagcatataggcaatatttacagaaagtcgttttaactagatcagattttttgaaagaaaggggcatatatgaaatggatttatcccataaaattctgattgataagggctgattataggatgggggttgtatgttgaatattgcattagtagttggttttaattcggatttagaagcgcaatcaattcgagcatctcttgaatattttggtgcaagggttgtgacatattggattggtagaccgaaagattttgtggaagttctttctggaaagaacttatttaacaatattaattatattattttttgctttcatggtgaagaagggaagtttgtcatggaagagttaggcgaagaagtatatgaacaagatgaaccgagaggggattttggtacagaagaaatttataaatatgcaaaattgcataatacacatattgtaaatagcgggtgcacgttaggggagcaaaatctagcaaaatcttttttacatagtggtgcgaaatcatatattggatcgattgattatgtagatggaaatgcagcacttatgtttactatacgcttattttatggggttattaaccatgggaaaacgttagaagaagcgtttcaagaagcgagtttaattgatgaggagacacatacatttcgattctataattagtgtgaaacaagtttattctatattcgaataaacttgtttcacatttaactcacatttttttacatttttttcaatgaaaatggttatcacttgtggtatgatatgttcaagtttttacaggtaataaaagttactatataaacgttagtttttaatgtttcatacgcatgtcacagattattcataattaacgtttgaaaaataagtaactaatgttattatattatctgtaactaacttaattacaactttaggaggaagatatggttattcaatttttaagagaaaacaaagcagtttcttttgcattagcagtaattcgagtatatcttggttacacatggttaatggctggaatcggtaaactacaaggaaaaggattcgatgcaacaggttatttgcaaggggcaattgaaaaatctaaaggtgcacaaccggctgttcaatcttggtgggcatcattcttacaagaatttgcaattccaaatgtagatttgtttaatacacttgtaacatggggagaaattttagtcggaattggtttaattgtaggctgtttaacaaaaacagcggtcttttttggtcttgtaatgaacttttcctatatgtttagtgggtcaattggtgtgaaccctgagatggttatcttatctatgtttgttcttgtttccggtatgaacgctgggaaatttggaatggatggcttcgttatcccgaaagtattaggatcaaaaactccaaaacgccaaaagcaagctgcttaatatatgaaaacgggtatctcattttgagatacccgtttatgttatttttcaactttaatcggattgttcttaaagaaatcttttacatacccgacaaattcttgtggttcttggcgaaatggtgcatgataacctttttcaataatatgtaaagtgctattttttaagaattgatgatacgtttctccttctttccaggaaacgctactatcatttctgccccatataattaaagttggctgttttatttcatttgcattaattttaagacgtctaggccataatttcattttattataatgctcttcatcattacgtttgaatttcactttgctttcatcataatctgtaatagaagaaacggcatttaaatcagtcgacaattgtggttttggtgagccttgtttattaacgaatgtatgagggccacctgtagcatcagttaaaataaggtgagtaactgcttcaggatataaatatgttaaatttagagaaatttctccccccatggaatgccccagtattgcgaatgaatcataccctagttttttcattaatttataatacaaatttgcatgagttggaaaagaataataaaaatccattggcttagatgagcgcccgaatcctaaagcatctacagaaataattgtatgatcttttgctaaatcggagtaaatcttttgaaaaccatctgatgaccctccaaagccatgaatcataagtaaaggtggtttttcattaccaatctttttaaagtaaatggtttgaccatctatttctaccattttttcctcggtagctagtttcgctgtaattgtatttttaacttgttttacttgttctactggcttttctgctgcactacatcctactaatagtgtaagagtaagacaacctaccataaaatagctaaatcgcttcaattaggtgtctcctttctaacataacgctgtatctatcatagcaaatagcatattacgatttccaggaagttggctaccattttttatcataagaggtgaaaggagcgtttcttggaaattttctgtttgaagaaattgacgaaatgtaaattgtgagtgtggaacatcaattcgtactataccattccaacattcacatatcttttttaataattggatagcatcttcttcttgctgggcgataagtggattgatacataatatattgcccttttgtatgcataatgaaaaagcttctatacagttatttctttcaattttaaaagagtgtacggcccttggtaatagcaaagagtaaagtagagaacgattcataccagttgcaatttgatccagagaagtaacaggtataaggtcttcttcttgtacttgttgtaagtgagaagggtacgtcttaatagtttgcttttcaaaacgatgaatcgttgttgctgtttgaaatccgcatgatgtgtatagaggttcgccagcttttgtcgcaataagtgcaatgggttgttttggatgaatttgttccaagcaatgatttagcaacatgcgccctattccgcgtccttgaaaattagggtgaacaattaacataccaatggaagcgaagttacttgtaaagggaaatactcctccagtcgcaatgagtttgttttcatgaatgtaacctacaagtgtgccgatagaaagatacatttcgaattgttttttcataaaaatttcatcgtgtaaccatccaacagatttgcaaagattaagtaattcaaaaataaaagattcatttagctttactattttcataaaggctcaccgcatttctatttattttcataaacatagagtcaaaatgtaaaaaaagagatttacgttaaatgaaatccaacttgtttatatttaaattgtaaagggcggaatgattgatacaaaaagacaaacttatacaaattataactgatatttacataagttaacaaaaaatttacatacagctaattttctcttaatagtcttccattaaatttgatagtgggaaatgaataacctaattagggggacaagacagtgaaaaagtttgtgaaaaaagcatggccatttgcagttgtggcatcattagcagttacttcggtagcaacatggaattttactcgttctagtgaggttaatgcagatgagaacggaagcaatgcaaagattaaaaatgttatcgtattaattggggatggtatgggtccttcatatatgacggctcaccgttatatgaaagataatccaaaaacctttgaaatggaatctacagaatttgataagcatcttgtaggaacacaaaaaacatacccagaagatgaacatgaaaatattacagactctgcatcggcagcaacagctatgtcagcaggaattaaaacatataatgctgcaattgcagttgataatgataaagcggaagtgaaaacagttcttgagcaagcgaaagaaaaagggaaatcaacgggactcgttgcaacttctgaaattacacatgcaacaccagctgctttcggtgcgcatgacattagccgtaaaaatatggacgcaattgcaaatgattattttgatgagaaaattaaagggaagcataaggtagatgttatgcttggcggcggcgtaaagaactttgttagaaaagatcgtaatcttacagaagagtttaagaaatctggttatagctatgtaacggatcgagatcaattgttaaatgataaaaatgatcaaattcttggtttatttgcaccaggtggattagataaaatgattgaccgcaatgagaaaacaccttcattagaagaaatgactaatgcagcaattgagcgtttgaacaaaaataaaaatggtttcttcttaatggtggaaggaagtcaaatcgactgggctggacatgataatgatattgttggtgcaatgagtgaaatggaagacttcgaaaaagctttcaaagcagcgattgagtttgcgaaaaaagataaaaatacgttagttgttgcaacggcagatcacgctactggtggcttatctttaggtgccaatggcgagtataactttaaagtagatccaattaaagctgcaaaacgcacaccagactttatggcaaatgagattgcaaaaggtgcaaatgtagaagaaacattgaaaaagtatattgatttacaattaactccagaagaaattcaagctgtaaatgatatagctccgtcaaaagatgtaacaaagattgataatgcaattgaagatattttcaataagcgctcggttacaggctggacaacaggtggacatacaggggaagatgtgaacgtgtatgcatttggtccaggtaaatacttgttctctggcgttcaagagaatacaaatatagcgaaacgtgtctttgatattgttggtggcggtgatccgaataaaggaagacgctaattaagagcgaaagtgaggcgaactgcctcgcttttctttttaggagttggaaatatgaaaaaaatatttgcgaaattaagattccttctagcatttgtagtattactagttggatgtcaacaagaagagaataatgtagcacaaaaatctactactaaaaaaactgaggaaaaggtacaaataacaaaagaagaagagaaatctattcaagatgttattcatacatttgtgcgaacgaccaatgaaaaaaatcttgcagaacatatggagttattttcaaagaagatgcctagtgctgaagacttaaaaacacaaaaagaagccgcatttcaaaagggaaataagaaaattgaattggaacatatagatatgaaagttagtaaagtagggtatgttattgttgaaacgaaagaaaaggaagtagacgacagtattactcttcaaaagaaagtacagtatgcccttggaaaagaagaggataaatggaagattgaagaggttcgaacaatagagaaaaaataacgtgaaactttaataagtgtggagtcatacttcccaaaaatgatagaaaaaaggttctcattggcgagaacctttttttatagtggtagcataatttgatttgaacatgcctcaatatcatcaatatcttgacgaattgtggccattttattatccagatcttcagctttcattgctgcatcatgtagttcatcttttaaatactccggtattttcccttcatatttataataaagtttgtgttctaaacttgcccaaaagtccattgccagtgtacgtaactgaatttctgcaaatacatcttttgtaccagaatttagtgataaagggtatttaatgatcatgtgtaaacttttatatccgtttcgttttgggttagcgatataatcttttacttctatgacttccatatcttcgcgtttttgaatgacttctttcaaatgatagatatcttctacgaagcaacatgtaatacgaataccaataatatcttgtaaatgtgtttgagcattttcaactgttggtaataagcttttgcgctctagttttttaataatactttcaggttgttttagtcttgtttttatatgttcaaacgggttgtaatcctctagaaattgagcttcccggttcataatttcaaatttagtttttaactcttctaaagcaaatgtatatggtaatacaaaagctttccagtagttaactgttgattgattatattccatttatatacacaccttttcctatttgcaagtgaggtcgttattatactaaataccaaatcatataagcgcaagcagcaaatgatgagatcataaagcgatatttagttttcatactttcaactcctttcgagtaagattttatataaataaacgtgattgttaataagttcactatgtacagtttctatagtaatagattcgtgtgaatttcgtatgaactaattgtttcagctttttgtcttttttgctgttaatcataattattattcggatttaaagtgtttttatttgatttatctatttgtataaattaatgtatatttaaatttacagttatcgaggaggatatatggtgaactttgaagaattagcaattgctagacgttctgcaatgaaatttatacaaggtatagaaatccctgatgaggattttaaaaaaatatttgagttaactaagctttctccatcttgctataatttgcagcacacacattatgttgtaattcgtgatcaagagcgaaaagaaagattaaaagaattagctttcggtcaatataaagtatcgagtgcatcagcggtagtgctcgtttgtggtgataaaaaagcataccaaaatgttgaaaatatttacttcggtatgaaagttttaaaaatgattgatgaatgtgaatatgaagatacaattaggcaaacgaaaggtttatatgaaggaaaaggagagcgtttcatggaggatgaagcgattagaaatgcttcgttaagcgcgatgacttttatgtacgcagctaaatattatggctatgatacatgtccaatgattggtttcgatgaaaaagcagtacaaagtgaattaaatatgccggagcatatagtacctgttttaatgattacgataggaaaaagtgatacgactaaaactcgcccacgaggatatcgaaagccgattagtgagtttgttacatacgaatcgttttaataaagtgaaacttttaatcagtggggggtcttactgcccgttaatgcgggagaaaatttatttaactataaaaacaaggggattctaaatggaatcttcttgtttttgcaattgacaaatggaatgaagttttataatatataaatcgtaatcattacgttttagttgcgatttttgaaagaaaggagaattaaatatgcgtgtaaatattacattagcttgtacggagtgcggtgatcgtaattacatttctaaaaaaaataaacgaaacaatccagaacgcatcgaattaaaaaaatattgtccacgattaaagcgagtaacgttacatcgtgaaacgaagtagaagactagagatatctctagtctttttttatagttctttggttttgtttgttataattaccttaaattgtaataaagggagcggtatgatgaatcaaaaagataaagaaagaaaagagcaagtggctcatattattaatattccagatgaatatagtcttgttgtagatgatcaagaagggggtgatgacccgtatcatctattatggtgggagcataaagaggatcaggagagaacgatacaaattacattgaatagacatactggtaatttaattgaatttaggatagatgatgaaaatcctttttcaagtggcaaggaagcgatagaggagaagaaggcaagagagattgcaaatgcgttcttgaaaaaatatacaaaagaaggatatgaattctatacatatgtaacggttaaggacgacaggcgcggttggaaagaagtaaattatatgcaagaagtgaatagctatccattgccgaatacagggtgcgttgtgcgagtgcactcttcaggtaatgttgtgcattttcattacaatggacaaaaagctatagagaaaaaaccgttatggccaagtgaaattgttgaggagaatatcgttttagaaaatttgaaagctagacaagatatgagacttgtatttatagatttaacatactcttcatgtgagtatgaaaacggggaagaagtaaaagggtaccatcttgtatatgaaccagagcctagtcatgcgtttattgatgcaagtacaggtaaagatttatttggaccagatcattataaattgccttcggctgtagctgttgaaaaatcgaaaaaaggtaacgaacgaggtgaagtattcgaattatttgactggaataaagaaggttttacaaaagtagatgagacagaaaatgatgatgaaataaggatgaaatttgttccgaaagaggaattacaaaaacagaaagaagaaaagaatccatatttaatgaatgaattctttaaaaagcatttaccgatgttgaaatataataatttagttagcgttacaattgataaattaaccaatgaattaactggttttataaaactgacagatgataaagaagtaaagcaaatactgtctagagaggaatgtttacaaagagcacttcaatttttagaacgagttattccagatatcacacaatatctgcgtctttgggaggaacgtgaagaagcagaagatgggattgaaagatttatcttttctgtatatataaatgatattccggcagagtataaccaatttatgattaacatcaatgcagaaaatggtgctgttatgcactactcgggggagtctagcaactttataaaagaattgctcacatatgaaataacaccaaaagtaactaaagaaaaagcgttagaaatatacagagaggctatccgagttaaattagaatggtttttagatcatgatgcagaggaaacgaaatacaaactactttacaaacaaacgacagatgaaaaacataaagaaccttttaattgtaggcgggaaattcgttatattgatgcccaagcggggagaaagatttggagtaagtaaaataaaagagttatttttcaaagaaaataactctttttatttttatactttgcctgttcgtttttcaaaagtaaatgtgataggaagattggaataagaactatcacttttaaatattactttccattctttagtatgggctttaatttcaaaattaagaagattcatcgctctacgtttatctatttctaaaaacatattatgaatctctggttcttgctgtaaattaagagcctttagtgtgactgtaaatgtgaaaaaattctgtccttcatatactatttttgatatttttgttttttgtttatttaacagcacataaaaacggtctgatggagttaattgtacagagtcatcagtaatttcattttcgctattatgaagttcaactaagtaagatgtactatgggaagaatcttttttgcttgtaatctgtaattcagtaggaatcatcggtatttcataaaaatcatttcttattatgttgttgtaatcctctgaaaatttacgaacttcttttgggaaagagtcatcttgtgtacttaaaaaagttttgttttgctttggaatttttttactaaaatttaatgtttctttaaagtaataattggatccagttaaaaataaacaactacagattaataaaaaaattcgatacggattttgaaagtgaaagaataatagtatacatgtaataattccaattacatagaaaataaagataagtagttctagttttgagtgaaaggagaaaccatagttatgaaaaaattttattccagttataatttgagctccaaaaaataaagaaattccaaattgaaaaaataataaatcaggccctcttttaataacaaaagtaatgaacgaaatgaaaagtaaaaatacccctaaataaattgttacatttaataatcgttctaatgtaatcatgaatagtgtcccctttaatagcatattcatatataaataacaattttatttaattataatataacaataaaatattttaaatgttagaagtgttgagttttataaataaactgtacagacacaaacaacctcacgcccacatacacataataaagaccactattttggcggaggtgaaaggtttgagtctattcgccgcaattggatatatggttcgagaagtgtttgtctttgtttcttatgtgaagaacaatgcgttcccgcagccgttatcatcagatgatgagagaaagtacttagagttaatggagcaaggtgatgctcaagcgagaaatcttttaattgaacataatttacggcttgtagctcatatcgttaaaaaatttgagaacacaggagaagatgcagaagatttaatttcaattggtacaatcgggctcattaaagcgatcgagagctattctgcaggaaagggaacgaagcttgcgacgtatgcagcacgctgtattgaaaatgaaattttgatgcatttacgtgtactaaagaaaacgaaaaaagatgtttcacttcatgatccgatcgggcaagataaagagggtaatgaaatatcgcttattgatatattaaaatcagagtctgaagatgtaattgatatgattcagcttagtatggagttagaaaaaattaaagagtatatcgatattttagacgaaagagaaaaagaagtgattgtgaaacgttttggacttgggctagataaggagaaaacacagcgggaaatcgctaaggcgcttggtatttctagaagctacgtatcacggattgaaaagcgtgctttaatgaaaatgttccacgagtttgtaagggcagagaaagagaaaaaagcgaaagagtaaagtgtattagaagcagccatatttaaaatgggctgctttttttattgtaaataagaaaagaaaacgcgttatgctaagaagaaatacacgttcactgttgaaaatgacggattctatctgtaatattagaaggtgctaaataatttaagaataataccatacttagttttctgtatatataataaggctgctttatatgatatgtgggaataagaaccaattttacatatgatatagaaagaaaagaagggaaaactaaagttatagactgattagggggtttcgcaatttgcgacgtacattatatcgacttatgatagaacttacaaatggtcgctttacttcttatatattacgtaaatttgcacaatctcgtttgagctctatcattattccatcgtacgcgaaagtttttcaaattaatcaagatgagatggaaaagggtttgaaggaatatagaacattgcatgaattatttacgcgtaagctaaaagaaggaaagcgtagtattgatacagatgcatcgagtatcgttagtcctgttgatggtgtttttgcagatcatggtcctattgaggatacaaaaacatttgatattaaaggaaagcgctattcaatcgtggatatgctaggtaatgaagaacgtgcaacgcgatatgcaggcggtacatatatggtaatttatttgagtccaagtcattatcatcgcattcatagtccgctttctggttctgtgactgaaagatttgtactcggtagaaaatcatatccggtaaatgcagctggtatggaatacgggaaagaaccactgtcaaaaaattatcgttctgttacagaagtaagcagtgatggcgagcatatggctcttgtaaaagtaggtgctatgtttgttaatagtattgagcttttgcatgagagagacactgttcaaaaaggtgaagaaatggcatactttacatttggttcaacagttgtgttattgtttgaaaaagatatgatagaagtagtgcaggaattaaagagtggacaagagcttcgtcttggtgaaaaaatagctactcgcttagctcataaataaagaaaagcttttataaccgtaagtaagagttatgggcaaagatacttaatgatgaaatcccctagatgggagtacttgtttattcgagagccatcgtaggatggctctttttacagggcatctaataatttatcctttaactgtttgattggtaagggctgattaaactttcactttatatgtaatcaagatgatttgacaagcttgtcctctaatgagcgtctaatgatttcttgttttataagtaaaatgaagtcgggatttaattttagttcttttgctttataataagactcagtgagtaactcagtggataactgttccatatgttttgttttcaaggtgagtcacctcctaataatataaggattgattcgttgatgcatttaatgtaccaaaaaaatatgacagtcacaaacgagtggttatccacatacctaggtggataaagtgtgtatagtttgttagtaaattccaaattaactgcaaaattaatgtggaaaatgtgtacaattttatccacaggttatatatcgaaaaatgttgtcgaaaaattttatgaaaaatcctcaaagaggtgaaagaaattgaaactatttttaccaaatgaatatgtgaaaaatgtatatcatgttcaaccagaagatttaaaaaaacgtgggattaaaggcgttattactgacttagataacactttaattgaatgggatcgtcccaatgcaacgccgcaacttgaaaaatggttcttggaaatgaaagagcaaggcattcaagtaacggtcgtttcaaataataatgagcaacgtgtgaaagattttgctgatccattaggtattccatttattcatagtgcacgtaaaccatttgttcgcgcatttaagcgtgcgatacaagagatgcgtttgcagccagatgaagttgtagtaattggagatcagttactgactgacgtgcttggtggaaaccgagtaggccttcatacaattttagttgtaccggtagcacaaacggacggattagtaacgcgctttaatcgaaaaattgaacgaagaattatgaaaaatatgaagaaaaaaggtttaattaactgggaggaataaagtttgactgaaacaattaaatgtattggttgcggtgtagaaattcaaacagaaaataaaaatgaagtggggtatgctcctgcctcatctttagagaaagaacaagtcatttgtcaacgttgttttcgcttgaagcattacaatgaaattcaagatgtatcgttaacagatgatgacttcctacgcattttaaatggaattggaaaatcagatgcattagtagtcaaaattgtagatatttttgattttaatggtagctggttacctggcttacatcgtttcgtagggaataataaagtattacttgttggaaataaagctgatttaattccaaagtcagtaaaacatgataaagtaaaacattggatgcgctatagtgcaaagcagctaggattaaaaccagaagatgtctttttaattagtgcagcgaagggacaaggaattgctgaactagcagatgctattgagtattatcgcggcggcaaagatgtttatgttgttggatgtacgaatgtaggaaaatcgacatttattaatcgtatgattaaagaatttagtgatgagactgaaaatgtaattacaacatctcatttcccaggaacaacactggatttaattgatattccattggacgaagagtcttctttatatgatacgccaggtattattaaccaccaccaaatggctcattatgttggaaagcaaagcttaaagcttattacaccaacaaaagaaattaagccgatggtattccaattaaatgaagaacaaacgttattctttagtggattggcacgttttgattatgtaagtggtggtcgtcgtgcatttacttgtcacttctcgaatcgcttaacaatccatcgtacaaagcttgagaaagcagatgaattatataaaaatcatgccggggatttattaagcccaccaacgccagaagaattagcaaatatgcctgagctagtgaaatacgaatttaatattcgtgaacctaaaacggatgttgtattctctggattaggatgggttactgtgaacgaaccaggagcaaaaattgttgcacacgtaccaaaaggagtaagtgtttcactacgtaaatctttaatttaatatggagagggatttatgaaacaattatatggtgtaatcggaaatccaattggacattcattatcacccgttatgcataacgatgcatttgaacacttgaatatggatgcccattatcatgcgttccttgttgaagaggaattgctaggggaagcagtaagaggtttaaaagcattaggtatttcaggatttaatgtaacaactccgcacaaggttgctattatggagtatttggatgagattgacccattggcaaggaaaatcggtgcagtaaatacagtggttcataaggatggaagattaattggctataacacagacgggattggttttgttcgagcgctgcagtcaattagtaatgaaccacttcaagggaaacgtattttgttacttggttcaggtggtgctagccgagctatttatttttctcttgctgatgtaggtgtaaaagagattgatgtagccaatcgtacagtagataaggcgaaggaacttattgctgcacgtacggccgatgttaattctgttgctttgtcgttagaaaaagcgacagaagaacaaggaaattatgatattatcattcagacgacaacgataggtatgcatccgcacgtagaatatacgccattacaaatttgttcgttaaaaaaaggaacgattgtatcagatataatttataatccatttgaaacgaaaattttatgtgaggcaaaagagcaaggtgcaatcattcaaaatggtattgatatgtttgtttatcaaggagcacttgcatttgaaatgtggacaggacgcaccccaaatatcgagagaatgaaacaattagttatagaaaagcttggaggctaacatatatgttaacaggaaaacaaaaaagatttttacgtgcacaagcacatcatttaacaccaatttttcaagtaggaaaaggcggagtaaatgaaaatatgattaaacaaattgcagatactttagaagctcgtgagttatttaaagtaagtgtattacaaaactgtgaatttgatcgccgtgaggttgcggaagaacttgcaaaaggtgcacgtgctgaaatcgttcaagtaattggaagcacaatcgttttatacaaagaatcaagagaaaataaacaaattaagcttcctcgataaaaagattagcatgcgctatttttatcgctgatgcgtaatgatgtagagagcgaaaccaattgaacttttattaatagcaactctcttcattcctaaccgaggagagttgctgtatataaaaggaaggggcgtttcttttgaggaaaattggcatcattggcggtacatttgatccgcctcactatggacatttgctaattgcaaatgaagtatatcacgctttgaacttggaagaagtatggttcttgccaaaccagattccgccacataaacaagggcggaatattacaagtgtagaaagtcgtttacatatgttagagctcgcgactgaggcagaagaacacttttctatttgtttagaagagctaagtaggaagggcccatcttatacgtatgacactatgttacaattgacgaagaagtatccggatgtgcagtttcactttattattggtggggatatggttgaatatttaccgaagtggtataacattgaagctttacttaatcttgtaacgtttgttggagttgcaagacctgggtatacattgcatacaccatataagattactacagtggaaattccggaatttgcagtttcttcatccttattacgtgagagatataaagagaagaaaacgtgtaaatatttacttcctgaaaaagtacaggtatatatcgagaggaatgggttgtatgaatcgtgagaatgcactgcatattgtcaaacaacaaatgcatgaaaaacgttatatacacacaattggtgtaatggagacagcgattgagcttgctaagttatacggtgtggacgagaaaaaagcagagatggcagctatattccatgattatgcgaaatgtagagcaatttcagaaatggaagagattattaaacgtgaagatttgccgaaagatttactttgctataacaaagagttatggcatgcacctgttggggcatacttagtagaaaaagaagtaggcattacggattctgaaattttgcaagctattacatatcatacaagtggtcatgagaatatgacgatgttagataaagtgatttatgtagctgattacattgaacctgggcgaaagtttccagaagtggaagaggctcgtaaactcgcatatacggatataaatcaagccctattatttgcgttaaagagaacaattcaatttttaatggaaaaagatcagacgatttatccattaacattccaaacatacaatgcagttatcaaggaggaaatgagtaaatgaacgataaagaattattagtattagcggcaaaagcagctgatgataagagagcagaagatatggttgtcctaaatatgcaaggtatttcaccaattgcagattatttcattatttgtcacggaaattcagataaacaagtgcaagcaattgcacgtgaaattaaatcaaaagcacatgagttccaaatcgacgtacaacgtatggaagggtttgacgaagcacgttgggtattagttgatcttggagatgtagttgctcatgtattccataaagatgagcgtaatcactataatttagagcgtctatggggtgatgtgccacgtgaagatattacagaagagttaggccaatgaaatacgaacaatttgcattgttgtacgacgaactaatgaatgatgtcccttatgataaatgggtggaatttacagagggaagtttacagcaggcaggtatgaaagaggcaaaaattcttgatgtagcatgcggtacaggtaatgtaaccctgccgcttgtgcaaaagggttacgatttaataggtgtcgatctttcagaagaaatgttaacagtcgctcagcaaaaactaggcggagaagggcattttattcctttttaccaacaagatatgcgcgagcttgatgttccgggtgagtttgactgtgtaacgattttttgtgattcattaaattatgtattgcaagaagatggagtacaagaaacatttagaagagtatttcaccatttacgtcaagatggtttgtttttatttgatgtacactctttatataaaatacatcatgtatttcaaaatgaaacgtatacagtgaatggagaagaaatatctcttatttggaattgcttccctggtgaagaatcaaatagtgtagagcatgatttaacattctttgttcaagatccagaagaagatgtgtaccatcggtttgacgaatgtcacgtgcaacgtgcatatcaagtggaagagttaacgaaatggcttgaagaagcaggttttacagtgcttcgtgtaacaggtgattttgagcgacttgaagttacagaacaaacagagcgtattttcttcatggcgaagaaaaacggataaaaacaaaagcaaccgagaaggttgcttttgttttataaagaagatgtatttttagttctagcataatctaaagatcgtatgcgtaaagtgtgggaatagtagttgaagtgaaaatgtattgtaaaaaagtaagtatttataaaaaggatttggaatgaaaatgacgtatttattatgtgtgtttattgaattgctgatcaacgcattctaaatcttcatcaaatttttcatgtgttcgctcgattaacttatggaacatatctccaacgtgttcttctaaaacccgaatgccttccccagtaacgccgcctttcacgcaaaccttttcttgtaaggtaggtaatgtgaagatttctttttcaagtaatttccccatccccacgaccatttcacttactaaagtagtagcctcttcgtgtgtaatatttgttttatctacagcagcgttaatgaagcattgtagtaaataactaaagaaagcaggaccgcaacttgctatatcagatgaaacgcgcgttatatcttcttttattacaagaggtgtagaaatgtttttgaatagacgaagtagtttttgttgccattcttcagagcaattatctccaaatgtaaatagtgaggcgccagagagagcgcgatttgtgatacttggaatgatacgcgcgacgtggcaaggtacgagagtctctaattgtgatggagatattggacttgtaatagaaactaagcacgtttcatcagaaaaatgttcagcgtatttttttaggatagggtatatatctatcggcttaacacaaataaaaataagttgtgattgttcgattacttccgggattgtttttgctatctgaacagaagggtatttttcttttatatgatatgcttttgcgggcgtccgattaatgattgtaaggcaagaaggtttgacagcacgggtttctaaaaatgcatcgattagtatatttcccatgtttcctgtccctataattcctatgttcaaagtttcatccctccttcgtaacagctttctcctaaacaatatgaatgatgttataaatttatgattagaggtgtaaaatgatgtgggattttccgaaaaagtggttaggtttagtagctattattggaactttactttttcttgttttttggaaaacgaatcagaatgtagaacgaacgcctattacaatgaatgtacaagagaaggagatagaaaaaaagggtaaaccgaaaatatcggatacaaaggaacagaaaagaacaattataattgatgtgaaaggagcggttagtaaagaaggggtatatgaaatgaaggaaggagatcgcgtaaaggatgcggttcaaaaggctggtggttttttatcagaagtagatatgaaaaaagtaaatttagcacaaattgtacaagatcaaatgcttctttatataccgagtaaaaatgagtcagaacaaggggtgcttacttcttctaaggaagatggcaagattcgaataaatacagcggcgaaagaacaactagaaaaaattacagggattggctctcgaaaggcagaaagtattttgaaatatcgagaagaacatggtccgtttcagaaaatagaagatttattagagattgatgggattggtgcgaagtctcttgaaaagataaaaggtcaaattattattccgtaaaagattgacgaagtttttcttctttcgctacactacaagtagacaaaaaagtaggtgaaaaatatggaacgaatttcatgggatcaatattttatgacgcaaagccatctactatctttgcgtagtacatgtacaaggcttgcggtaggagcgacaatcgttcgcgataaacgaattattgctggtgggtataatggttcaattaaaggtggcgtacattgtatagatgatggttgttacgtaatcgataatcattgtgttcggacaattcatgccgaaatgaatgctttattacaatgtgccaagtttggtgcgaaaacagaggaagcagaaatttacgttacgcatttcccttgtttacaatgttgtaaggcaattattcaaagtggtattacagcggtttattatgcgcaggattataaaaatcatccatacgccatagagttatttgaacaagcgaacgtaacagtgaagcacgttccgctagaatatgatattgctgcattagaggagcaaaaacgttatacagagttgaaagaattatttgcgtctttagaaaaagataatttatcaatggaagaattacagcatgtattcacgaaagcaaaaatgatgctataaggagtgagtataagttgcaggaacaatgggggtatgttgcaatctcatttataataggggttgcaattgccttttcctcgtcacttttattgatagttttttgcctctttttaaatgttttcttctgtttatatcgcacttcgcgtaaaaccttcattttttgtattgtagcgtgctttaatagcgccatatacacttcctatgttcaaacgtggaataagcctctaggggagtcctatggagttacaagaggggttatacaaaatgcaccgcttgttaatggggatcgcctatcttttcaatttgaagatcagaataaaaatatagtgcagttaagttatagaatcaaatcagtcttggaaaagaaaaaaatgcaacaattatacgcagggatatcatgtgtattcgagggtgagaggaaagaaccggaaacagctcggaattttcatggttttaattaccgtgattatttatacaaacaacatattcatttcacatttgaggctacatatatttctgaatgctataaaacatcactgtcgctcacgcaatggattcttcttttgaggcaacaagtaatctcgaaagttacagaaatgtttccagagcaatcaggtgcttttatgaatgcattactatttggtgatagacaacaaatgacgtttgaagtggaagagcaatatcaacaatttggtcttgtacatttgttagcaatttcaggttcgcacattgtactgttaatggtgatagtatattttattttgctaagaagcggtgtgacaagggaggtagcaacaatttgccttatcgtttgtattcctttgtatatggttttagcaggggcgtcaccctctgttataagagcttctataacaggagttttgatgttaattgcttttatgtgctcgattcgtttatctagtttagatgctttaagtgtaacagctatatgcatgcttatatatgacccttatcttgtttttaatattggatttcagttttcttttgtaggtagcttcgctttacttttgtctgctccgttattgttagagagtagcaacggagtaatccgaaattctatttatatttctatcatttcacagctcgttagtactccgattttgttataccactttggttatttttctccatatagcattctcctcaatctcttatacgttccgtttttatctatcattgtattaccatgtagcattattattttactgtgtatgccaattgtcccgtttctcgcaaaaggatttgccgatgtattatcaataggcttgagtatgtctaatgattttctaagttattgtgaaagtttaccatttacccagcttatcttcggggaaacgcccttcaatcttgtagctgtatattgcgccagtattgtcagcatattgatggtttgggaacggagagcgccgaaaaaaatagtttgtatagttgcgagtgtatttctttttattagcacatgtcattatatatatccatattttagaggcggcggaagtgtaacatttattgatgttggacaaggtgatgcaatattaattcgccttccgtatgataaagggatttatcttattgatacaggtggaacgcttcgtgtgaataaggaagaatggcaacaaaaaaagcatgaattttctgttggaaaggatgttttaataccctttttacaaaaagaaggtattaaaacaattgataaattaatcgtaacgcatggagatgcagatcatataggtgctgcgcaagaattattatcatatatacctgtaaaagaagtggtatttggccgaaagggaaaagatgcagtattagaaaaagtagtaaagaaacaggcattagaaaaggaaatgaaaataactgaagtgggggaaggggagagttggagtgtaaatgaagcggaatttttcgttttagctccaaaaggaaaagaaaaaagcgaaaataacgcttcaattgtaatatgggcaaaatttggagggttgaagtggctatttacaggcgatttggaagaagaaggggaaaagattttagtagaggcatatccagatttacaagtggatgttttaaaagttgctcatcatgggagtaatacgtcatctatagagccttttttgaacgtcatacagcctcgtgtagcgattatatctgttggtaagcagaataggtatggacacccgcataaagaagtgatagagcgttttgagaagatggggagtgcgatatggcgcacggacaagcaaggtgctatttcctatgtttttaaaggggaaaatggaacctttaaaagtaaaatcacatatgataaaacacataatagatgaaaaagagaagactgccatgaagtggcagtctttaagaaccgataaatttaataacagttgcaatgatgaaaagtgttgcgaaaaaaccaaatgagacgataaatcctacccctgaatcaatagcgtcattgcgtttactttgaacgttttgttcaaaatcattcatttagaatccctccccaacattccactttagtataaaatattgtcagaaaaaaatctacaatttccatatgaagagaaaacgagcttttttgttacttgtaaatcatgaagtaatgtgagtttttcgtttccaagcatgttaacagttggcacttatactcaaatttttattgcgaataataaagggaaggtgattaccgcacaccaataagaaacccggggcttattgcgtggcgtttaatataaataaagggacgggttataaagcctgttcctttgtacttgtaaaacaaaagctagggcattagtataaatatatattgccaagttagggagtaggaaaaagtatgagtgatatacataaaaaaattaaaaagaaacagtttgctccgttatatttaatatatggaacggaagctttttttataaatgaaacgataaagcttattacgacagaagcacttgaagaagaagatcgagagtttaatgttgtgacatacgatttagaagaagcgtatttagaagatgtggttgaggatgcgcgtacgcttcctttcttcggagaacggaaagtactgttaataaaatcaccgctatttttgacttcgcaaaaagaaaagttagagcaaaatataaaaattttagaagaatacattggtgaaccttctccattttctattcttgtttttgttgcgccttacgaaaaacttgatgagcgaaaaaaaattacaaaactattaaagaaaacagcagatgtagtagaagcgaatgcgatgcaagtacaggatgttcagaagtggattgttgctcgtgcagatgaagtgcatgtgcatattgataacgcggctgttagtttgttgctagagcttgtgggaagtaatgtaacgatgttggcgaaggaaatggacaagttaacgttatacgttggtatgggcggagagattacgacgaaacttgttgcagagcttgtgccaaaatcagttgagcaaaatgtatttgctttgacagaaaaagtggtgaaaaaagatattgcaggtgcaatgcaaattttggatggattatttacgcagcaggaagagccgattaaattgcttgcgttattagtgagtcaattccgcttgttgtatcaagtgaaagagctacagcaacgtggttatggacaaaatcaaattgcgtctcatattggtgtacatccgtatcgtgtaaagttagcaatgaatcaaacgaagtttttctcttttgaagaattaaaaaaagtgattatagaattagcggaagctgattatagtatgaagacgggaaagatggataagaagcttgtgctcgaatttttcttaatgcgattaaatcatatgtgatgacacaaaaaagttcatgcacttagtgcatgaacttttttgtatataaaaaaacgatccaaatggatcgttttttaaacgccttacgcgtttacttgtttcgctaagcgagatttttgacgagctgcagcgttttggtggataagacctttacgagctgctttgtcaagttttttagaagcagttttgaaagcttctttagcattttcaagatcgttattagtaactaaagcttctacagttttaacagcagaacgcatgtcagacttgatagaagcgttatgtgcacgacgctcttcgctaagtttagcgcgtttgatagcagatttgatgtttgccatacttttcacctccctggtgcaatcgaatgactcgattcttacatagaacaagtgatattctatcaaacggtgaagagaattgcaatagtatatccatgaaatttcacgtaaaggaaagaatgaccttatataactttgggaaatctaacgatatttactatgaattacggaggagatacgatgaaagaaccattagatttaagtaaatatagcattagaactgaccttgctgtagaagctcatcaaatgttgcaagaaagccaagaagaacaaaaagggatacagggagttattgtaaaagagagagaagaagaaggtactataattacaaaagtaacgattgatgaagctgcctctgaagcgatggggaaaaaacctggaaattatttaacacttgaagtacaagggatacgtcagcaagatacagaacttcaacaaaaagtggagcgtatttttgcaaaagaattttcttgtttcttagaagaggttggagttacaaaagaagcaagctgtttaattgtaggtcttgggaattggaatgtaacaccagatgctcttggaccgatagttgtagaaaatgtattagtaacgagacatttgtttcaattgcagcctgaaagtgtagaagaaggatttaggcctgttagtgcaattcggccgggggtaatggggattacaggaatcgaaacgagcgatgttatttatggaattattgagaagacgaacccggactttgtaattgcaattgatgcattagctgctcgttctattgaacgagtaaatagcacgatacaaatttctgatactggaatccatcctggatcaggggttgggaataaacgtaaagaactaagtaaagacacattaggtatccctgttatcgcaattggtgttccgactgtggtcgatgctgtttcgattacaagtgatacgattgattttattttgaaacattttggtcgagagatgaaagaaggaaataaaccttcacgatctttgttaccagcgggattttcatttggagaaaagaaaaaattaacagaagaagatatgccggatgaaaagagcagaaatatgtttttaggtgctgttggtacattggaagaagaagaaaaaagaaggctgatttatgaagtgctatctcctcttggtcataatttaatggtaaccccaaaagaagtagatacttttattgaggatatggcgaatgtaatagcgagtggtttaaatgcagcgctacatcatcaaattgatcaagataatacgggagcatatacacattgaggggaacagatgattatggtttgagtcgctttgcgcttttgtgtatatgtagtgtagctttatgtttacttatgatgatagcaggagtggcacttgctaatcatggtttgaaaagtatgaaaggctatcagcaattgtcatatgaacaaatagctcatatgacagggacagaaagtacaggtgctgaatcagaaattttgggtagctcgttttcggcctcagaaaaacaacagcaattagaacgtttaagaagttttaatgttgtagaaggaattgggatggcggtagcaagtgtagcttatgaaatgacgaagttcgggacggatatagttgttgggaaaataaaaggaatttttagctaagagtaacatgggaggcggttgttttactgatttgtaggacagccgttttaaaatttgaaaagggtttgtctcttatggtttattcgcataagatatagatagaatgatttgtatcgtaagcagcacgagttttcattgaatctttgttgctctattgatataatcagtgctagtgtatattggcgagactattaggagttgagaacatagatgaataaagaagaaagagcaaaaagacagtccaaaattcgtaatttctctattattgctcatattgaccacggaaaatcaacgttagcagaccgtattttagagaaaacaaacgcgttaacacaacgcgaaatgaaagctcagttgcttgactctatggatttagagcgtgagcgtggtattacaatcaaattaaacgcagtacaattaaactataaagcaaaagatggtgaagagtatattcttcatttaattgatacaccaggacatgtcgactttacgtacgaagtatctcgtagtttagcggcttgtgaaggcgcgattcttgtagtagatgcagcgcaaggtattgaagcgcaaacgttagcaaacgtatacttagcgcttgataacaatttagaaattttaccagttattaataaaatcgacttaccaagtgcggatccagaacgtgtacgtcaagaggtagaagatgtaattggtttagatgcatcagaagcggtacttgcttctgcgaaagctggaattggtattgaagaaattttagaacaaattgttgaaaaagtaccagctccgtcgggtgattcagaagagccattacaatgtatgattttcgactctttatatgatccgtaccgcggtgtaattgcttatatccgtgttgtaaatggaacagtaaaagttggcgataaagtacgtatgatggcaacgggtaaagaatttgaagtaacagaagtaggtgtatttacaccgaaaactacgcaacgtgacgagttaacagtaggtgatgtaggtttcttagcagcatcgattaaaaatgttggtgacacacgtgttggtgatacgattacacatgcgaaacgtccagctgcagagccgttagcaggttaccgtaagttaaatccgatggtattctgtggtctgtatccaattgactctgctcgttataacgatttacgtgatgcattagaaaaattagagttaaacgattctgctcttgagtttgaaccagaaacatctcaagcgctaggatttggtttccgttgtggtttcttagggcttcttcacatggaaatcattcaagaacgtattgaacgtgaatttaagattgacttaattacaacagcgccaagcgttatttataaagtttatttaactaacggtgaagatgttattgttgataacccatctaatatgccagatccacagtctatcgatcgtgtagaagagccgtttgtgaaggcttcaattatggttccgaatgactatgttggagctgtaatggagatttgccaaggtaaacgtggaacgtttattgatatgcaatatttagatgaaacgcgtgttacattaacatatgaaatcccgttatcagaaatcgtatatgacttcttcgatcaattgaaatcaaatacgaaagggtatgcatcatttgattacgagttaattggctataaaccatctaaacttgtgaaaatggatattcttttaaataatgaacaagtggatgctttatcatttatcgtacaccgtgattcagcgtatgaccgtggtaaagtaatcgtagagaaattaaaagaattaattccgagacaacagtttgaagtgccaattcaggcgactatcggaaataaagttgtagcacgttctacaattaaagcgatgcgtaaaaacgtacttgcaaaatgttacggcggtgacatttctcgtaagcgtaaacttcttgataagcaaaaagaaggtaaaaaacgtatgaagtctgttggttctgtagaagtaccgcaagaggcatttatggctgtactgaaaatggatgacaactaatatttgaaataaaaaagaagtcgtttgtgcggcttcttttttctgtataattactttttagacatctgagcagctctcatttacaataatgagagagctttttagttcatatagagttaggagattgttaatgtccgaaaatattcgaaaagatattcaagataaaatacaaaatggtaattttaattgtgaaaaggaattgacgctttctattattagtggaaagtggaaagttgtgatactgtggcatcttggtgtggaaggaccacatcgtttcagtgaattacaacggttattcccaagcatttctcataaagttttgtcgaaccaattaaaagagttaatggaagatggaattgttgatcggacagtatatcccgaaattcctcctcgcgttgagtattatatgacggaactaggcatgtcacttttaccgatcgttgaaatgatgtatgattggggaaaaatgcgaatggaacaaattcgtaatacgttagagaagtagagaaccctccggagtgcggaggttttctttttagaaaggtaggagttatatttggtacaagctgcatatattcatattccgttttgtcagcacatttgtcactattgtgattttaataaagtgtttattgaacgccaaccggttgatcaatatttagattatttagagaaggaaataataaatacggttcaaaaaattccgtttgatagtataaaaacgatttttgtgggcgggggaactccgacagcgttaaatatggaacagacaaaaaaattactcgagattattaatcgtcatttgcgtccgttcgccccaaattgtgaattaacatttgaagcgaatccaggagatctgccgaaagagaagttgaatgtactgctagaaggtggagtgaatcgaattagttttggtgtgcaaacgttccgtgatgaactgcttgagaaaatcgggcgcaagcatacgagggaagatgcattcctcgcgattcgagaagcgcaggaagtaggatttaaaaatattaatgtagatattatttatgctttgccaggacagacgatagaagatgtaaaagaaacattagatattgcttttacgcttggtgtacaacatttctctgcatattcattaattgtagaacctaaaacagtgttttataacttaatgaacaaagggaaattgcgtcttccgggtgaagaccatgaagcgaaaatgtatgaaatagtaatggatgaaatggagaaacacggttataaccagtatgaaattagtaatttctcaaaaggtgacaataaaagtagacataatctcacatactggaataatgaagagtattatggatttggagctggagctcatagttatgtgaacggggaacgtattcaaaatgtaggtccgctgaagcaatattttaataaaattgatgaaacaggatttccgtatttagatgttcacaaagtgacggagaaagaaagaatggaagaagagctgttcttagggcttcgaaaaacaaaaggtgtttctaaaacggcgttccgcaataaatttaatatagagatggatcaagttttcgcgaagcagttacaaagcaaccaagagcagggattgcttgaagaggaagatggacatgtgcgtttaacgcgaaaaggaaaattattagggaatgaagtattccaatcatttttgattgactaattaaatgttccataggcgtgaaaaagtttcattatttcgtgacgtttccgttgacaattgaatgtcaattttggtaagttattaatagatttagcactcaaagacaaagagtgctaacagaggtgatgatgagatgcttacggaacgtcagctcttaattttacaaacaattattgatgactttattggatcagcgcagcccgttgggtctagaacgttggctaaaaaagatgaaattacatttagttcagctactattcgaaatgaaatggcggacttagaagaattaggttttattgaaaaaacgcacagttcttctggacgtgttccttctgagaaaggctaccgattttatgtagaccatcttttagcaccgcaaaacttaccgaacgctgaaattgtacaaattaaagatttatttgctgaaagaatttttgaagcggaaaaaattgcacaacaatctgctcaaattttatcagaacttacgaattatacggccattgttcttggaccgaagttaagtacaaataaacttaaaaatgtacaaattgtgccgcttgatcgtcaaactgctgtcgctattattgtaaccgatacagggcatgtacaaagtaaaacgattaccgttccggaatctgttgatttatcagatttagaaaaaatggttaatattttaaatgaaaagctatctggcgtaccgatggaagaacttcataataaaatctttaaggagattgttacagttttacgtgggtatgttcataattacgatagtgcaataaaaatgttggatggtacatttcaagttccgttatcggaaaagatatactttggaggaaaagcaaatatgctttcgcagccagagttccatgacattcaaaaggttagatctttacttaccatgattgataatgaagccgaattttatgacattttgcgtcataaacaagtcgggattcaagtgaaaattggtagggaaaactcttcgacggctatggaggattgtagtttaatttctgcaacatattcgatcggcgaagagcaacttggaacaattgctattttaggtcctacgagaatgcaatattctcgtgtaattagtttgttacagttatttacgagacaatttactgatggacttaaaaagtaaatgagagtaatacattcgctcaagtgatgaaattttcattgctgtgtgtaatatataatgcttaggtaatcatgctatgcatgatacctaataccttttaaggaggtgaatattgtggaagagcgtaacgaacaagtggtagaagaagtaaaagaagcgcaagttgaagaagctgtcacaccagaaaacagtgaagaaactgtagaagaaaaaagtgaggctgctcttttacaagaaaaagtagatgagctacaagcgaaactaacggaaacggaaggtcgcacattacgtctacaagctgattttgaaaattataagcgccgtgtccaaatggataaacaggctgctgaaaaatatagagcacaaagtctagtttcagacatcttgccagctcttgataattttgaaagagcaatgcaagtggaagcgactgatgagcaaacgaaatccttgttacaaggtatggaaatggtgcatcgtcaattgttagaagcgctgactaaagaaggtgtggaagtgattgaagctgttggtaaacagtttgatcctaatgaacaccaagctattatgcaagtggaagatagtgaatttgaatcaaacgcggttgtggaagaattccaaaaaggttataaactaaaagaccgtgtgattcgcccatcaatggtaaaagtaaatcaataatttacataaaactaggaggattcgccatgagtaaaattatcggtattgacttaggtacaacaaactcttgtgtagctgttatggaaggtggagaaccaaaggttatcccaaatccagaaggaaaccgtacaacaccttctgttgtagctttcaaaaatgaagaacgtcaagttggggaagttgcaaagcgccaagcaattacaaacccaaatacaatcatgtctgttaaacgtcatatgggtacagactacaaagtagaagttgaaggtaaagattatacacctcaagaaatttctgcaatcattttacaaaacttaaaagcttctgctgaagcatacttaggtgaaacagtaacgaaagctgttattacagtacctgcatacttcaacgatgcagagcgtcaagcaacgaaagatgctggtcgtattgctggtttagaagttgagcgtatcattaacgagccaacagcagcagcacttgcttacggtttagaaaaacaagacgaagaacaaaaaatcttagtatatgacttaggtggcggtacatttgacgtatctatccttgagttagcagacggcacattcgaagttatttcaactgctggtgacaaccgtcttggtggcgatgactttgaccaagttatcatcgatcacttagtagctgagttcaaaaaagaaaataacattgatttaagccaagataaaatggcgcttcaacgcttgaaagatgcagctgaaaaagcgaaaaaagatctttctggtgtaacacaaactcaaatttcattaccattcattagtgctggagctgctggtccattacacttagaattaacgttaacaagagcgaaattcgaagagctttcagcaggtcttgttgaaagaacattagagccaactcgtcgtgcattaaaagacgctggttttgctccaagcgaattagataaagttattcttgttggtggatctactcgtatcccagctgtacaagaagctattaaacgtgaaactggtaaagagccatataaaggtgtaaaccctgatgaagttgtagcattaggtgctgcagttcaaggtggcgtacttactggtgatgtagaaggcgttctattattagacgtaactccactttctttaggtattgaaactatgggtggcgtgttcacgaaattaatcgagcgtaacactacaattccaacaagtaagtcacaagtattctcgacagctgctgataatcaaccagcagtagacattcacgtattacaaggtgagcgtccaatgtcggctgacaacaaaacgttaggtcgtttccaattaactgaccttccaccagcaccacgtggtattccacaaatcgaagtaacattcgatattgatgcgaacggtatcgttaacgtacgtgcgaaagacttaggaacaagcaaagagcaagctattacaatccaatcttcttcaggtctttctgatgaagaagtagaacgtatggtacaagaagcggaagcaaatgctgacgctgaccaaaaacgtaaggaagaagttgaacttcgtaacgaagctgaccaacttgtattccaaacagacaaagttgtaaaagatttagaaggtaaagtagatgcagctgaagttgcaaaagcaacagaagcgaaagaagcattacaagctgcaattgagaaaaacgagcttgaagaaattcgtgcgaaaaaagatgctttacaagaaatcgtacaacaattaactgttaaattatacgagcaggctcaagcagctgctggtcaagcagaaggtgcgcaaggtgcacaagatgctggcgcaaagaaagacaatgtagttgacgctgagtttgaagaagtaaaagaagacaagtaattcaattgtaaacataataagtaagatgacaaaaagtcaaagtcaagcgtgccttgactttggcttttttcacgaatgagaagcgatgtgtgaggatcttaagtttttcgctttgcatactgtaagtgaggaaactttgttgcaaagcactttctttcggtgttaaaattacgtttatgtgaaagattcgggggttgtaaatttatgagtaaacgagactattatgaggtccttggacttagcaagggcgcttcaacagatgaaattaaaaaagcgtatcgtcgtttggctaaaaaataccatccagacgtaagcaaagaagaaaatgcaattgaaaagtttaaagaagtacaagaagcatacgaagtgttaagtgatgatcaaaagcgtgcacagtacgatcaatttggtcatgctggtgcaaatcaaggattcggtggatttggcggcggaggagacttcggcggtggcttcggttttgaagatatatttagttctttctttggcggtggcggcggcagacgtcgtgatccaaatgctccgcgccaaggtgctgacttacaatatcaagtcactttagattttgaagaagctatttttggtaaggaattaaatgtggaaattccagtagaagatccatgtgatacttgtaaaggtagtggagcaaaaccaggaacttcaaaagaaacatgtaaacattgttcaggctctggtcaagtgagtgtagaacaaaacacaccgtttggtcgtatcgtaaatcgtcaagcttgtggtcattgttcaggaactggacaaattattaaagaaaaatgtacgacatgtcacggttcaggtaaagttcgtaaacgtaaaaaaatcaatgttaaaattccagcgggtatcgataatggtcaacaaattcgtgtgtctggaaaaggtgaagccggcgtaaatggcggaccagcaggagacttatatgttgtcgttcatgtaagaagtcatgaattcttcgagcgtgaaggagatcacattatttgcgaaatgccattaacatttgcgcaaatggcgcttggtgatgaagtggaagttcctactgttcatggtaaagtgaagctgaagattccagcaggaacacaaactggaacagaattccgcttaaaaggaaaaggtgctccgaacgtacgtggatacggccaaggagatcaatatgtagtcgttcgtgttgttgtaccgacgaaattgacttcgcagcaaaaagatttattacgtgaatttgcaggacaagaagagcaggatgatagtttattcggaaagcttaaacgtgctttcaaaggggaataatggaaataaaaaatggagttggtaaattgtgaaatggtcagaaattagtattcttacaacagaagaagcagtagaagctgtctctcatattttacatgaagctggtgctagtggagttgcgattgaggatccagcggagttaacgaaagagcgcgagcaacaatatggtgaaatttatgcattgaacccagatgaatatccggcggaaggtgtattaataaaagcgtatttcccgcaaacggattctttacatgaaacgattgcaggtgtaaaatcatctattgatgtgcttccatcttacgacatcgaaattggtactggaaatattaccgttaacgaagtcaatgaagaagattgggctactgcttggaaaaaatattaccatccagtacaaatttctgatacattcacaatcgtaccgacttgggaagaatatacaccatcttctcctgatgaaaaaatcattgaattagacccgggtatggcgtttggtacaggaactcatccaacaacaacgatgtgtatccgtgctttagaaaaaacagtacagccaggtgacactattattgatgtaggaacaggttctggtgtacttagtattgcggctgcaaaattaggtgcgtcttctgttcaagcatatgatttagatccggttgcggttgaaagtgcagaaatgaatgtacgtttaaataaaacagatgatatcgtgtctgttggacaaaatagtcttttagaaggcattgaaggtcctgttgatttaatcgtagctaacttattagcagaaattattctattattccctgaagatgcagcaagagttgtgaagtcaggtggattatttattacatcgggcattattgctgcgaaggaaaaagtaatttctgaggcgttagaacaagctggatttacaattgaagaagtgttacgaatggaagattgggtagcaattattgcacgaaatgcgtaatatagattttagtctataatgaaaagggggagtctctcactataaggtgagagacttgccgtttgttatatgaaaaatgataacgtttcgttcttttcgtaagtgttgacttacgaaaggaacgaaactctactaaggtgattatatgcaacgttattttgtagaagagaaatatgtaaatgagacaagtattcgcattgtaggtgatgacgtacatcatatcgcaagagtgatgcgtatgtcagctggtgatcatatttattgctgtgtaaacggaaaaacagcagtatgttcaattgatgaaattaccagtgaatttattaatacggctattgtagaatgggtagaggcgtcaagtgaacttcctgttttcgtgacgattgcaagtggactgccaaaaggagacaagctagagttaatttttcaaaaaggaactgagcttggggcagctgcattcttaccatttcaagcatctcgctctatcgtaaaatgggatgcgaaaaaagctgataaaaaagttgagcgtttaagaaaaattgtgaaagaagctgcggaacaatcacatagaagtgaaattccagaagtacatgctccggcatcatttaagcaattgctttcaatgagtggtgagtatgatgtttgtcttgttgcttacgaagaggaagcaaaacaaggtgagaaatctaattttgcgaaagctttaacgacaatgaaaccaggtcaaaagctattgattgtatttggcccagaaggcggtttagctgaggaagagattacagcgcttcgtgaacataaatttgtaccatgtagtttaggaccaagaattttaagaacagaaacggcgccgttatacgcgttaagtgctgcttcgtatcattttgaattgatggggtgatgatcaatgtcaactgttgcgttccatacgttaggttgtaaagtaaaccactatgaaacagaagccatttggcaattgtttaaacaaggtggttatgaaagaacagaatatgaaaagaaagctgatgtatatgttattaacacatgtacagtaacgaatactggggacaaaaaaagccgtcaagtaatcagacgtgctgtgcgtcaaaatccagatgcagttatttgcgtaacgggatgttatgcacaaacatctccagctgaaattatggcgattccgggtgtagatattgtagttggtacacaggatcgtgaaaagatgttaggttacatcgaagaattccgtaaagagcgtcaaccaattaatgctgtccgtaatattatgaaaacacgtgtgtatgaagaacttgatgtaccttatttcacggatcgtacacgtgcgtctttaaaaatacaagagggttgcaataacttctgtacattctgtatcattccttgggcgcgtggtttaatgcgttctcgtgatggaaaagaagttattaaacaagcacaacaattagtggatgcaggctataaagaaatcgtattaacgggtattcatacaggtggatacggcgaagacataaaagattataacttagctggattacttcgtgatatggaagcggaagtagggggattaaaacgtcttcgtatttcttctattgaagcgagtcaaatttcagatgaagtaattgaagtgttagataaatctgaagtagttgtacgccacttgcatattccgttgcaatctggttctaatactgtattaaaacgtatgcgtcgtaaatatacgatggagttcttccaagagcgtttagatcgtttgaaagaagcgttaccaggccttgcgattacatctgacgtaatcgttggtttcccaggtgaaacagaagaagaattcatggaaacatacaatttcattaaagagaaccgcttctctgagttacatgtgttcccttactcaaaacgtacaggaacacctgcagcacgcatggaagatcaagttcctgaagatgtgaagaatgatcgtgttcatcgtttaattgagctatctaatcaattagcgaaagaatatgcatcagcgtttgaaggtgaagtgcttgaaatcattccagaagagcaatttaaagacggcgaccgtgaagggttatatgtagggtatacagataactacttgaaaattgtatttgaaggatcagaagaattaattggtaagctagtgaaagtgaaaattacgaaagctggttatccatataacgaagcgcaatttgttcgtgttcttgaagatgatgtaaaaaaagaatcagctagcgcataaaaagagcgtgcaaccggaaacggtttgcatgctttctttatttgaagcggttaagtactataaggtggggaggcgtttcatgcatccctgtatgaaaaaagatgaaatgataaaaatatagttgtcttcatcagtaaaggatactagctatttgcataacttttgaaaaggaaatgcttctattcttcttttattctgccaaatagttgacctgaagtgataaaatgtattataatcgtaaaagacatgctgaagaagtgtttctttttgcatgctgaagttagtatgtaagtgtgatgtttcggagggagggaaagagaatgtcaaaaacagtcgttcgtaaaaacgagtctttggaggatgcacttcgccgttttaaaagatcggtttctaaaactggtacacttgctgaagcaagaaagcgcgagttttatgaaaaaccaagtgtaaaacgtaagaagaaatctgaagcggcaagaaagcgtaaattctaagagagggtgtaagttatgagtcttctcggtcgtttaaacgatgatatgaaacaagcgatgaagaataaacaaaaagaaaaattaaccgttattcgtatggttaaggctgctttacaaaatgaaggtattaaactgcaacatactcttactgaagaagaggaaataacagttttagctcgtgaagtaaaacagtataaggactccctccttgaatttaaaaaagctggtcgtgaagaccttgttaataaactgcaaagtgaaattcagattttaagcgcatatttgccagagcaattaactgaagaagaactagttgatgtaatcaagcaagttatttctgaagttggtgcgacttctaaagcagatatgggtaaggtgatgactgctgttatgccgaaagtaaaaggtaaaacagacggatcacttgtgaataagctggttatccagctattagcgtaaaaaaacgtctcatttcgtatgagacgtttttttattgttcttattaaggagaaacgctatattgcttaaaaagggtttctataagtgatagaaacccctctagttaaagtttcaatttattatttccttgtataattccgattctacacctattcttacttccttgactaaaacttctttcgcaaataaaagctaagtaccgaaccttctgaaaatcagattgaagttttatagcttgctcttcagcataatcctcaaaggtaacgaaagagattctaactattttagattttgcatcagttgcataaaatggccggatattactgtcgataatttgttttataacattcgaaatttcttgactaaagccaatttactttcgtatttcctcatttattaattcattttttaatgaaccctaatattttttgaaattcatataacaaccatctataaaatattcttacttacaacgtaacattcagagtggagaaattttctttttttttgattttatccctcattaacgggcagcccgattggtgaggggggattaaagtttcactttatctcatttgtccaataaatgacaactacttattctatggtcagtatgtcacatccagaacgaattgtaacagtttttttcaagtttctaacttctcgctaggctcaatttcttaatgtaacttgtactgatatcctgtaggggcgcatattcttgtattaatacttctattattaaaggtaacatcctctgatccatcattgtcctgacaaatatgatttcatatagcgactgttttaattaacatgatatgaactcttacagaatatagttatgttagtgaagtcgttataacacgataggcacttgtgaagaaatacatatatatgggatgagagggggtctttcgagatgaagaaattagaacaaatgaaaaattggttgacaaaacaagtagacctaccagtggatgtattaatggatctacctcggattactcttgttgggcaaatacatatttatatagaaaatcatcgggggttattagtgttttcagataaagaagtgcgattacttttaaaacacggtcaattattaattaaaggacaatcctttgttattaaaacgattcttccagaagagcttttgctcgaagggataattgagcaagtaacatttttagaaaatgaaaaaaaaggtgattgaagtgaaacttccatttgtgaagtttttcttctttatcctgtaaaagttccgttgatagagactgattacagttttactcggtttcattttagtacgagctattttaatgtttcaaataaaaagtagtatatctacttttagaaaggtagtgaaggtggtaaatgaaaaataaatggtttataaagtggcttggatatgtaaaagtgcgaattgaaggtagaggagcggaacggtttgttaatgaatgtgtacggaggaatttattagtttgggatgttaaaaagatagctgatgaaacgttagttttttgtatgttgttacgcgatgtgaaaaaaataaaaccaatttatagaaaaaatgaatgtaaattatattttattggacgttatggttttcctttttggaataagcgtttaattaaaaatagtggatttttaattggttttttaattttcttttttggtgtgattgcaatgtcaaatatggtttggaaaattgaaattacaggagcaaaacctgaaacggaatatatattgatgaaagaattggataaaatgggtattaaaaaagggaaactacaatttcaaatgccgaatgtagaagatgtacaacgccatttgacagataatattaatgccattacttgggcgggactagaagtaagaggaacgacgtatcattttaaaattgttgaaaaaaacgaaccgaagaaagaaaaggaacaaaggccgcaaaatttagtagcaaaaaaagaagcgattattacaaagacgttcgtagaagttggaaagccggttgtactgaaaaatgatcatgtagaaaaagggcagattctcgtatcaggaatatatggtaatgaggaaagtccgacgattgtttcagcgaaaggtattgtgtatggagaaacgtggtatacatctaaggtggatgtcccgttaaagacgcaattccaagtgtatactggtaatgtatacaatgaacattttcttaaatttggggatacgaaaataaaaatatggggatttcagcatgataagtataaacgctctcgtactgaaagtgtaaaacatgatgtgaaattatttggttttacactgccgattgcatatgaaaaagatgttgtgagagaagaggaagaagcgaatcgagaatatacagaaaagcaagcgctgaaagtagcgaaagagatggccgaaaaagaactaaagaaaaaattggatgaacatgctatgattgtaagtgataagattttgagtaaagaggttgaggcgggtcaactaaaggtcacattgcattatactgtggttgaaaatattgcagagccacaaccaatatccgaatccgatattcaaggagactgagtaatggcagaacaattagtagaaatgaaccaaaaattggaaaatactaacgaagcaatcgctctttttggagtcaatgatgcacatttaaaagtaattgaacgagaactgaatgtatcgatcgtaactagaggagaaactgttcatgtatctggggcagttgaaacggtgacactcgtagaaaaaatcttacagcaattacttgttgtaattcgtaaaagtatatcaatttcagagagagatgttgcgtatgcaattcagcttgcacaacaagggaaaattgctcaatttgaagagttatatgaagaagaaattttcaagactgcaaaaggtaaatccattcgtgtaaaaacaatggggcaaagacgatatattcatgcgatgaagaagaatgatattgtctttgggatagggcctgcaggaactggaaaaacatacttagctgtagtaatggctgtgagggctttaaaacaagggtatgtaaagaaaattattttaacaagacctgctgtagaagctggagaaaatttaggttttttaccaggggatttgaaagagaaggtagatccatacttacgcccattatatgatgccttacatgatattcttggacaagaatatacgcagcgtatgatggagcgaggagtaattgaaatcgcgccgcttgcttatatgagggggcgtacgcttgatgattcatttgttattttagatgaggctcaaaatacaacgggtgctcaaataaaaatgtttttaacaagattaggttttagttctaaaatggttattacaggggatccttcacaagtagacttgccaaaaggggtaaaatcaggactatctatagctgctaatattttatctgatgtatcaggtctgtcatttattacattagaacaaacggacgttgtgagacatccattggtgcaacgtattattgaggcatatgataaaatggaatgatcctatttgtcaggatcatttctttttgtatgataaggttggcgaacgtcatattttttactatcatgaaagataaggaaaataaactataggtactagtgtataaaatgttgcctcaaagtatcgtttggtagaagaaatgaaagctataaatagtttcactttatttctggagaggagaaggtattgaaatcatgtcaagatctcaagaaatttctaagtggtttcgtaatttacaacattcgaaaaaactaagttggatttcttacgttgtattaggagcagtgctgttttttgcgcttatgaataatgtaaaaccagagcaattagatgttaatatgtattctattgcgaaaaagacaatccattctcctataaaaattgaagataaagttacaacggataaaaagaaaaaagaagccgctacaaaagttgaagatcaatatacatataaaagtgagtataaacaaaacaaagttgatattgtgaatgacgtttttgctaaagtggatgaagtggtgcaagagattaaagctgttggaccggatgatcaaaaaaagatgactgatgctgagaaagtggagaagttaaaaaagaaactacccgctgacttaacgaaagaattatctgattcaaacttactaagtttgattaatgcagattcgagccaattagtattagcgaaagatgctgcggtcacagcgattaatagtatcatgactgagcatattaaaatggacgaattgaaagatgcgaaagaacgatatgtaagtgagatgaatagtgttaatgttgataatggtttaaaagagtcaattaaggcgctaggaagatatgcaatttcagcaaactatttttatgacccgatcttaacgaaagagaaaagaaaagcagaggaagatttagttccacctgtttatattcttcaaggacaagttcttgttagagaaggtgaaacaatttcaagtgatgtgtataatcagttgaaattagttggtttgttagaaaaagggaacggctttcaaccttatgttggattagcggtactcattggtgtgttactatactttatgcataaacaatttgaattatttttaaagagaaaaagagaagatagaccgtatgttttagcgtatattacaattttgtctatcacaatcgtcttaatgaaaatcattagtttgtttcaaaaacttgaatacgcggggattgcatatgttgtcccagttgcgatgggaacaatacttgtaaaactaatgattggtgatcgatttgtctttttaacgagtatgattttttctgtatgcggaagtattatgtttaatgaaggagtaacgagtacattaaattatagtgtagggatttacgtattgttaagttcattatcggttagtattttcttgcgagaaaaaaatcgtcgtacaatgattttacaagctggtatactcgtttctgtattaaatgtagtcgtattggcggcgctcttattattacgtaatgggaatttttcgcctcttgaaattggtacgcaattattaatggcttcactttcagggattatatcatccgttttggctatggggattttaccatatttagaaagtggacttggaatcgtatcaagcatgaagcttatggaactatcaagtccaaatcatccgcttttacgcagaattttgttagaagcgccagggacatatcatcatagtgtaatggtagcgaatctttctgaggctgcttgtgaagcagtcggggcaaatggtgtattagcgcgtgtaggggcatattatcatgatgtaggaaaaacagtacaaccgcaattttttattgaaaaccaaatgggaattgaaaacccgcatgataaattagatcctgtaacgagtaaagatattataattgctcacgtaacggatggagtaagaatgctcgaagaatatcatattccacaagaaattattgatatcgctgggcaacatcacggtacaacgttactgaaatatttttattataaagctattaaagaagataaagaaaaatatacagaagagatgttccgttatccaggttcaaaagcaacttcgaaagaatcggcaattgttggtattgctgatagtgtagaagctgcggtacgttctatgaatcacccaacgccagaacaaattaataatttggtgcaaagtattattaaagatcgactacaagacggtcaatttagtgaatgtgatttgacgtttaaggaactacaaatcgttggaaaaacgttgtgtgaaacgttaaatggtattttccattcgcgtattacatatccggaacttccggaagaaaaggagaaagaatgagtttgttaattgattttattgatgaaacagaagaagtaaaagaagcgtatatgagtttaattcgtgaagtgttagaaaaagcagctcaaatggaaaatatcgaggatggtgcggaggtatcggtgacatttgtagataatgagcgcattagagaaattaatcgtgattaccgagataaagatcaacctacagatgtaatatcctttgcgatggaagaaatgggagaaggagaaatggagattgttggtgcagagatgccacgcatgttaggtgatcttattatctctattccaagggcgaaagagcaagctgaagagtacggacattctttcgatcgtgaacttggatttttggcattacatggctttttacatttacttggttatgatcacatgacagaagaagatgaaaaagaaatgttcggaagacaaaaagaaattttagaagcttttggattaggacgatgaaaaaaggaaaacttatagatagttttggatatgctatagctggtatattcttttgttttcgtcatgagcgaaatatgaaaatccattatttagccgcagtcattgttatatgctgcggcttttatttccatattacgagaacagagtggatgatattacttattgtaatagggagtgtaatgagtttagaaatggtaaatacggctgtggaaaaaacagtagatttagcgactgccgatattcatccatttgcaaaaattgcaaaggatgttgcggcaggagcggttttattgtttgcaattatagctgttataattggtgctattatctttttaccgtatatggtatagttgcattccgaagcttttattaagctttggaagtgccgtaaggggctttaatgagagagtgtacctcttcatagctgtgaacaggaaggatgcgggaatatgaatagtaaacaattaattctagaagcaatcgaagcgcgtaaacaagcgtacgtaccatattctaaatttcaagtaggtgcagcactattaacgcgcgatggaaaagtatatcgtggatgtaatgttgagaatgcatcatatggcttatgtaattgtgctgaaagaacagctttatttaaggcggtttctgaaggagataaagaatttgtagccattgcggttgtagcagatacaaagcgcccagtacctccttgtggagcatgtcgacaagttatggtagaattatgtaaacaggatacgaaagtatacttaacaaatttacatggtgacgttcaagagacgacagtcggagaattgttaccaggagcatttttagcggaggatttacatgaatagaaaaggttataaatcaggttttgtctctattattggcagaccgaatgttgggaaatctacatttttaaatcgtattatcggccagaaaattgctattatgagtgataagccacaaacgactcgtaataaaattcaaggtgtatatacagaaaatgatgcacaagttattttcattgatacaccaggaatacataaacctaaacataaactaggcgacttcatggtgaagatggcgcaaacgacattaaaagaagttgatatcgttctgtttatggttaatgctgtcgaaggctttggtcgtggtgaagaattcatcatcgagaagttaaaagaaacgaaacaaccagtatttttagtaattaataaaattgaccaacttcatccagagcaattactagagttaattgatcaatatcgtaaactacatgagtttgcagagattgtaccaatttctgcgttagacggtaataatgtggacgctttaattggaacaattaaaaagtatttaccagaaggaccacaatactatccagataatcaagtaacggatcatccggagagatttattattgcagagcttattcgtgagaaagtactacatttaacacgtgaagaagtgccgcattctgtggctgttgttatcgatgcgattcaaaagcgtgagggcggggcagtttatataaatgcaacgattgttgttgaacgtgcatcacaaaaaggaatcatcatcggaaaacaagggaaaatgttaaaagaagttggtaagcgagctcgttttgatattgaagcgctacttggttctaaagtatttttagaagtatgggtaaaagtgcaaaaagattggcgtaataaaatgtctcagcttcgtgacctaggtttccgcgaggatgagtactaaaatagagtcaagctgtaatcagtggatggttggttcatccactgattattggtttttatgaactttgataaattaggaaaaatttttctcacatgaaaatggacaaaatgggtcaatttaataacaacaaaggaaattggtttataggctacgcttattgagaaaggtggattcttatgctagattttacctggaagtttttctccaaaacaggaagcattgaaacgtacttgcttttgaaagaaatggaaaaagacgtaaacgatgagatggatcaacatgaagaggagctagcgcatctagactctccaatttcttgacccgttttgttcaaaccttggatggtgacgaacatgtttcaaaaagttgagggcatcgttatccgtacgacagattacggagaaacgaacaagattgttacaatattctcaagagaacttggtaaggtaagtgcaatggcaagaggggcaaaaaaaccgaaaagccgattagcatctgtgtcgcaattaatgacacatggccagtttcttattcaaatgggatctgggcttggaacattgcaacaaggcgagattatttcaactatgaaagaaattcgcgaggatatatttttaactgcttatgcatcatttattgttgaattaactgataaagcaacagaagataaaaaacataatccgtatttatttgaaatgttatatcaaacgttgcattatatgtgtgagggtgttgatccagaagtattatcattaatttatcaaacgaaaatgcttccggtattagggatgcgcccgtactttgatacatgtgcgatttgtcatcaagaaacagactttgtcgccttctccgttagggaaggcggttttctgtgctcacgtcatgcggagcaagacccgtatcgtataccggtaggagaagctgttcataaattattacgtcttttcttccatttcgatttacataggctcggaaatgtatcggtaaaggatagcacaaaaaaacaaatgcgtttagtattgaatacatattatgatgaatattgcggaatttatttgaaatcaagacgttttttagaacaacttgataagtttcaaatataattttgggccgtatacggtcctttttacatactttctttttcgaatagcatatttagtatataatatttaagagatagtataacttttttcgttgtgcattaaaggtggtgattatcatagagctgaataaacggcaagaacatatcattcagattgtaaaagatcacggtcctattacaggggaatcaattgcagcgcaattgggtctaacacgtgcgacgctaagaccagacttagcaattttaacgatggctggttatttagaagcacgtccacgcgtaggttatttttatacgggtaaaactggggggcagctattatctgaagctgttaagaaaattaaagtacaagattatcaatctagaccggttgtaattgataaaaatgtttccgtatacgatgcaatttgtacgatgtttttagaggacgttggtacattgttcgttgtagatcagatgactctattagttggtgttgtgtctcgtaaagatttattaagagcgagcttaggaaagcaggatttaacctctcttccggttaatattatcatgacaaggatgccaaacattgcgatgtgtcgtagagaggattctttatatgatattgcgatggaattaatagaaagacagattgatgcaatgccagttgtaaaagatacgaaacaaggtttagaagtgattgggcgaattacaaaaacaaatattacacgtgcgtttgtaaatttagtaaataacgaataagtgtaatttgtttaaagtgaggtaatgtaatggataataaaatcgtatatgtcgtatctgactctgtaggagaaacggctgatttggttgttcgagcagcaatggggcaattcccgtttgctcctgatattagacgtgtaccgtatgtagaagatacagggacattaaaagaagtgatttcgattgctaagagtaatcaagcacttatatgttttacgttagttaagcctgatatgcgcaaatatttagtaacagaggctgcaaaagaaggggtagaggcatacgatattatcggccctcttattgatcaaattgaagaaattacggggcaagtgccgagatatgaaccaggcgttgtccgtaggttagatgaagaatactttaaaaagattgaagcgattgagtttgctgtgaagtatgatgacggcagagatgcacgaggtattttaaaagcggatatcgtgttgattggtgtttcgcgtacatcaaaaacaccactttcccaatatttagctcataataaacgcttgaaagttgcgaatgtaccactcgtgccagaagttgacccacctgaagaactatatcaagtggcaaaagaaaaatgtttcggtttgaaaattacgccagataagttaaatcatattcgaaaagaacgattaaaatcacttggattaagtgatggagcaacatatgcaaatattaatcgtattcaagaagaaattgatcactttgaggaagtaattagtaaaataaattgtcaagtaatcgatgtatcgaataaagcaattgaagaaacagcaaatattattgtgaatgcagtgcaaaaccaaaaaatgttttagcacatttaccaaaggtgaatgtgcttttttcgctcgtgtgaaatatggtacctatggattttgtaatagattgtagtgtaatggttatacttatactcctttgtcttttagtatattcaaggtgtgagtttgtcatcctgaaatgtaagatgaaaaaataaagggatatgtagcgtagttgaagaaaatatattataataaaaaattgtgataaaaacctatattttacgtttagactttaatttttcagaataaactagggataggatttacgaaaaagacatgtaattacgttaaatcgacaaaatctatacaagaaaacgcacattatggaaggattcacagaagggatgtagaatacagaaatatgcaaagcatcaacaacatattagttggtgtagatgtatatcccgtgaaggctgaaattgtgcaagttggagcggaatttcatgtcggaattttgtttgtcgcatcatatgctcatcctttaaggaaatagcaaggcaattggatctttgtagatactgaacaaaatggagttgatcgttatatggatcaacatgaaaaagttacaaatctcaagatcaaacagtatatgtggcttgctactcttcttataaaaaggtgtgtatgtattgtttctaagagatacatttgtaacagatgagcaaatgtatacaattttatatagcaagtatgtatatgcgatttatgcagataaaggacctataggaaaggttcaaaatcgtttatacaatgtaatcggcaacactttctaacaagtttagaaaaatattgtcgaattataaaggaattttttaatttatatcgaatacaaaatacgacacggagatggagttatggggaacagaattcccgaagaagttgttgaacagattcggacatcatccgatattgtagaagtcattggtgaatacgttcaacttagaaaacaggggcgtaactatttcggcctttgtccatttcatggtgagaattctccttcattctctgtttcatctgataagcaaatttttcattgcttcggatgtggagaaggtggaaatgtattttcctttctaatgaaaatggaaggactggcttttaccgaggctgttcaaaagctaggcgaaagaaatggaattgcggttgcagagtatacatcagggcaaggacaacaagaagacatatctgatgacactgtcatcatgcaacaagctcatgaattattgaaaaagtattatcatcatttattagtaaatacggaagagggaaatgaagcactttcatatttattaaaccgtggtattacgaaagagatgattgagaagtttgaaattggttatgcatcacctgcttgggatgcagcgacgaaaattttacaaaaaagaggtttatcgctgtctagtatggaacaagctggccttctaataagaagtgagaaggatggtagtcattatgatcgcttccgtggaagagttatgttcccgatctatacgttacaaggtaaggtgatagcgtttagtggaagggcgttaggagatgacactccgaaatatttaaatagccctgaaacaccgatttttcacaaaagtaaattgttgtataacttccaccaagcaagaccgtttattagaaagcgtgggcaagtggttcttttcgaaggatatgccgatgtactagctgcggtaaaaagtggtgtggaagaagctgttgcgacaatgggaacagctttaactgaagaacaagcaaaacttctgcgacgtaacgttgaaactgttgttctttgctatgatggtgataaagcagggcgagaagcgacgatgaaagcagggcaattattgctaaaagttggttgccaagtgaaagtcacatccttgccagataagcttgatcctgatgaatatgtgcaacaatatgggactactgcttttgaaaatcttgtgaaatcaagtgtgagttttgttggttttaaaataaattatttgcgtttagggaaaaatttgcaagatgagtctggcaaagaagaatatgtgaagagtgttttaaaagagttatcgttgttacaagatgcgatgcaggcagagtcatatttgaagtcattatcgcaagaattttcgtattcaatggaaacacttttgaaccaattgcaccaatatcgcaaagaacaaaaggtacagcaaaaacaaataaagcaggttgctaaaacgtctcaagtcgttcaaacaaaaccgaagttaacaggttttgaaagagcggaaagagaaattatttaccatatgttgcaaagtgcagaagtagctgttcgtatggaatcccatatagaagattttcatacagaagaacataaagggattttatatgaactatacgcatattatgaaaagggaaatgaaccttcagttggaacatttttaagttggctctctgatgaaaagttgaaaaatattatcactgatatttcgacggatgaatttattaatccagaatacacagaagaagtgttgcaaggccatttggagacgcttagacggcatcaggaaaaacttgaaaagatggaaattatctttaaagtgaaacaaatggaaaaaacagatcctgtagaggctgctaaatattatgtagcatatttacaaaatcaaaaagcgagaaaatagcttttttgataaagttttagtataatgaatgtttgtatctcgcgtaaggaggggaacagatggctgacaaaccagctcgttctaaacaaattgaaactgaaatgacccttgagcaagtgaaagaacaactcactgagctcggaaaaaaacgtggcgttcttacatatgaagagattgcagaacgcatgaatggatttgaaattgaatccgatcaaatggatgaatactatgaatatttaggtgaacaaggcattgatttagttggtgataatgacaacgaagaaggccctaataatcgccaaattacaaaaacagaagaagagtttgacctcaatgatttaagtgtaccacctggggttaaaatcaacgatcctgttcgtatgtatttaaaagaaattggtcgtgtagacttactatctgcagaagaagaaattcgacttgcaacgcgtattgaagaaggcgatgaagaagcgaaacgtcgtcttgcagaagcaaacttacgtcttgtagtaagtattgcaaagcgctatgtaggccgtggtatgcttttcttagacttaattcaagaaggtaatatgggtctaattaaagctgttgaaaagttcgattatcgtaaaggtttcaaatttagtacgtatgcaacttggtggattcgccaagctattacacgtgccattgcagaccaagcgcgaacaattcgtattccagttcatatggttgaaacaattaataagttaattcgtgtacaacgtcaattattacaagatttaggtcgcgaaccatctcctgaagagattggtgaggaaatggatcttgctccagaaaaagtacgtgaaatcttaaaaattgcacaggagccagtttctcttgaaacaccaattggtgaagaagatgactcccatttaggtgactttattgaagaccaagaagcaacatcgcctgcggaccatgcagcctatgaattgctaaaagaacaattagaagatgtgttagatacactaacagatcgtgaagaaaatgttctacgtcttcgtttcggtttagatgatggacgaactcgtacgcttgaagaagttgggaaagtattcggcgtaacgagagagcgtattcgtcaaattgaagcaaaagcacttcgcaaattaagacatccaagccgtagtaagcgtcttaaggatttcttagaataggttattttttaagtttacttcacttttgtgaagtaaacttttttattttgttaatttttgttaaaatttagctatgggcaacgattacaatttcttgtaatttattttacagaattgtcttttgatttgcaaatgctcatttttcgatttttcgattaattttgtttattatatacaaaaatatatgtagaaaagcgaaaaatatgatgagaaacgttaataattatcgaaataataagcgatatgacaataaaaaacaataaactgaatttatggaatatttttaacaagtggtagtttgctcttttctgatagagcgttttcaagtacaatataaatgactgaatcatctaactatttaggggtatagaggggggagaagagatatgaaacgtaatccgctgattccgttcgctcttattgcagcattgggtattatcgttatgtttgtattttcatttcaggggctaaataaatctaaagagttagctgatgcaaaaaatggcgggaagccagcacaaacggcatcaaaaccagaagatattgtgaagcaaagctgtacgagctgccatggtgatcagttacaaggggcagttggacctaacttacaaaaaattggtgggaaactttcaaaggatgaaattaaagaaattctttcgaaaggaaaaggcaatatgcctgccaatatagttccagctgatcaagccgctaaagtagctgattggttatcgaagaaaaaataaagttccgtatgacaagccttttgcttatgcaaagggcttgtttttctatattttctaaaatacgatgaatgatagagcggtgaattgttgttatgggcttgcaacaactactgtaaattcattatcatggagacagactgacaagagaaggagtaatggaaatacatgaatgaagtaaagctttcaaaacgattagaagaagttgtacgtgaaataccagtaggatctacagttgctgatattggatcggatcatgcgtatttaccgtgttatacaattataaataatattgctacaaaagcagttgcaggagaggttgtagatggaccatttcgctctgcgcaagcaactgtagctgaaagtggtttacaagataaagtagatgtgcgtaaagggaatggattagctgttatcgcaccaggagaagtagatgtaattacggttgccggaatgggcggagcgttaattcgtgacattttagaaagtggtaaagaaaaattagaaggtgtaacacgtttaattttacagccgaatattgcagcgcatcatattcgtgaatggtttattgagaatggttgggagcttatccatgaaaaaatcgtaaaagaagatgggaaaatttacgaaattttagtaggggagcgcggaaatgttgtagcgccttactctgaaaataaacaagctgaattgtttatgggaccatttttaataacagaaaaaagtgaagccttcgttgaaaaatgggaaggagaattaaaaaacttccaaaatattttaaaacagttagaacgtgcggctgattctgaagaaacaaaagcgaagcgtggggaagtagaagcgaaaatgaaaatgataggggaggttttatcatgagtaaaattccaaacggccatgaaattatttctttatttgaaagtatgtatccgaagcatttggcaatggaaggagataagattggtctgcagattggagcgcttaataaacccgtgcagcacgtattgattgcgctagatgtaacggaagaagttgtggatgaagcaattcaattaggggcaaatgtcattattgctcatcatcctttaatttttaacccgttaaaagcgattcatacagataaggtgtatgggaaaattattgaaaagtgtattaaaaatgatattgcaatctatgcagcgcatacaaatgtggatgttgctaagggcggggtaaacgatttacttgctgaggcgttaggattgcaaaatacagaagttttggcaccgacatatgcagaagaaatgaaaaaagttgttgtgtttgtgccagtcactcatgcagaagaagtaaggaaagcattaggagacgcaggtgctggtcatatcggcaattatagccactgtacgtttagtagcgagggtacaggcacatttgtacctcaagaggggacaaatccttatatcggggaaactggacagttagaacgtgtagaagaagtgcgaatcgaaacgattattccagcttccttacagcggaaagtgattaaagcaatggtaacggcgcacccttatgaagaagtagcgtacgatgtgtatccgcttgataataaaggtgaaacgttaggcctaggaaaaataggatacttacaagaagaaatgacgcttggccaatttgcagaacatgtgaaacaatcattagacgtgaagggcgcaagagttgtcggtaagttagatgataaagtgcgtaaagtagctgtacttggtggagatggtgataaatatataaaccaagcgaaatttaaaggagcagatgtatatgtaactggtgacatgtactatcatgttgctcatgatgcgatgatgctcggtttaaatatagttgacccaggacataatgttgaaaaagtaatgaaacaaggtgtacaaaagcaattacaagaaaaagtggatgcaaagaaactcaatgtacacattcatgcttcgcagttacatacagatccatttatatttgtataagaaaaataaaaaccgttgctcatgtaagcaacggtttttattattgttcttttttcactttcacgcgaggtaatattttttgtaacggtacttttcgaactctttcccatgtagcgggattcattgggtcatattgctctaagaaagcgataacttctttcgtaattggcgttggagtagaagcacctgctgtaacagctacgttttctacaccttgtagccactctaattgaatttcgcttacatcagcaactcgatatgcttttgtacccgcgatttcttgtgatacttgtgctaagcgatttgaattgttacttttcggatcaccaacaacaattgttaagtctgcaacatcagcttgtttagcgacagcttcttggcgaacttgagtagctaaacaaatttctttatggaattctgctgttgggaattttttttgaatgtcctccattaaatgttgaacatcccattgactcatcgttgtttgatttgttactaaaattttatctgttgggatttctaatgtttttaaatcatcggctctttcgataaggtgaacgatgtcaggtgcaataccaactgcgccttctggctctggatgattttttttaccgatataaatgacatgatacccttccgctttcttagcttcgataaggtcatgcgtcttggtaacatctgggcaagtggcatcgattgttgttaaacctttttcttttgcgcgttgtttaacttctggagaaacaccgtgtgctgtgaaaataacagtaccagaatcaattttatctaaaatttctaagcgacttggaccgtctaatgtgatgattccatcttcttcaaaagcgtctgtaacatgtttattgtgaacaatcatacctaaaatataaatgggtctcggcaatgatttatctaatgcagcgttacgtgcaattaccattgcatcgacaacaccgtagcaataaccacgaggggaaattttaacaattttcatatgagtaatcctctccttctaaacaagggatacttttgtgcatagtcttttacattataaaggaggagtggatagaaaacaaaggattgttacacatatagttttggttttgttgctgtttgttgaactggttctttcggtaactctttttctattacaggttcaatcactattttctttcgttttcgtttctttttttgaggtgcaggaggcggactttctacctcaactggctctgttacattttccgtttgattttcttccgtactttttccagaggtgaggattttaacaatgcttggtagactacgcataataggaccatactgttcgacgacaggacctacagattgaacgacttgggatactttttcgatgttgtttatcatattagtaggattcgaaattaagttcgaaaagaaactgccgatgccactgcttgctgttgcggcagctgtagttgcgccgccgcgcgtttcatttgattcatacatttgaggcggtatcatttgctcaggatgttgctgcatgtatggttgatattgtggatgttgctgctgatattgttggtggtattgctgctgatattgctgttgatattgtggcggtggtggttgctgatgcatcatcggttgcccttccatttgtcggtaaggtggaaccatttgcataaaaggctcggttggatcgtgttttttaaaaagcttagcaagaaaacctttctttttttgtgccattggtggtagttgtggaattggatatggtgtataaggttgttgccctggattcggatacatttgccttgtaggggatttcggaaacatgtgagaaatcctcctttcttcagttaggtatatacacatacaatatgcaataaaagggaagaaggttagtttttgaagtgaaaacctaaactaaagatggattttacttgtagatttcgatataatgtagacttgactgatttgtgcgcgcagtagaaattttagaaagaaggtgtaacttatgacacaacaaacttttacacagtatgattttaaaccatttttaatagatgcagttcgtgaactacgctttacagagccgacaggaattcagcagaaaattttcccggtcgtgaaaaaaggtgtaagtgtaattggacaatcccaaacaggttctgggaaaacacatgcatacttacttcctacattaaacagaattaatgcaagtcgtgaagaagtacaacttgttattacagcgcctactcgtgagttagcacaacaaatttacgaagaaatcgtgaaattaacaaagttttgtgcggaagaccaaatgattacagcacgttgtttaattggtggaactgataaacaacgctcaattgaaaagttgaaaaaacaacctcatatcgtagttggaacaccaggacgtattaaagatttagtagaagagcaagcattatttgttcataaagcaaatacgattattgtcgatgaagcagacttaatgcttgatatgggattcattcatgatgtagataaaattgcagcacgcatgcctaaaaacttgcaaatgttagttttctctgcaacaattcctcaaaaactaaaaccgtttctgaagaagtatatggagaatccagagcatattcatatcaatccaaaacaagttgcagctggaaacattgaacactatttagtgccttctaaacatcgtaataaaattgatttagtgcataaaatgctacttcaatttaaaccgtatttagcagttgttttcacgaatacgaaaaagatggcagaccaagttgctgatggattaatggaacgtggcttaaaagttggacgaattcacggggatttatcaccacgtgatcgtaaaaaaatgatgaaacaaattcgtgaccttgaattccaatatattgttgcgactgatttagcagcacgtggtattgatattgaagggattagccatgttattaactatgagctaccatcagatttagatttcttcgttcaccgcgttggaagaacagcacgtgcggggcattctggtattgcagtgacgatatatgatccagcaaacgaagaagcgttagatagtttagaaaaacaacgtcatattgagttcaagcatgtagatttacgcggagatgagtgggccgatttaggtgagcgtcgtcgtcgtaagagccgtaaaaaaccaaatgacgaacttgatgttatggcaacgaaagttattaaaaaaccgaaaaaagtaaaaccaaactataaacgtaaacttgcaacagaacgtgacaaagtgaagaaaaaatatggcaataaaaaaagataaggggtttcccttatcttttttttatcccgctatttgtgggagatgtaatcaatatggatagaaaagtattgattaaagtttcacttaatccagctaatttaaatgaaaagtatagtctgtataaatagtcatataaatttgtgtagtgcatcttttgtgaacaaacaattcactacatatttctacaaattatgctatcattatatctattgtatattgaagaggtgattgtatgttaaagattggatctcatgtttccatgagtggtaagaaaatgttattagcagcaagtgaagaggctgtttcatacggtgcaacaacgtttatgatttatacaggtgcaccgcaaaatacacgaagaaaaccaattgaagaattgaacatagaagcaggaagaaaacatatggagctgaacggaattgaggaaattatcgtccatgcgccgtatattattaatgttgggaatacgacgaagccagaaacattccaattaggcgtagactttcttcgcatggaaattgaaagaacatcggcattaggtgtagcgaaacaaattgttcttcacccaggagcgcacgttggtgctggagcagatgctggtattcaacaaattattaaagggcttaatgaagtattaacgccagaacagacggttaacattgcgttagagacgatggcaggaaaaggaacagaatgcggtcgtagctttgaagaaattgcaaaaattattgatggtgtaaaatataatgaaaagctatctgtatgctttgatacgtgtcatacgcacgatgcaggatatgatattgtaaatgactttgacggcgtattaaacgaatttgataagatcgttggtatagatcgtttacaagtacttcatattaatgatagtaaaaatgtacgcggagcaggaaaagaccgtcatgaaaacattggatttggtcacattgggtataaagcattgcatcacattgtacatcatccacagttaatgcatgtaccaaaaattcttgaaacaccgtatgtaggggaagataaaaaagataagaagccaccatacaaattggaaatcgaaatgctgaaaaacggcacttttgatgaagggcttcttgaaaaaattaaagcgcaataaggagggggaaatcccctccttattttagtagttgctgaaataatgtatttacttgttgggcagtggcaggggaagttacttttgcgatttgttttaagagctctagtcgctcgttgttatcgtaaatattaatatttttacccttcataagtaaaacgatttgatcagcttgtgcggctgtaatgggaacttcatattctttgctatattttaataactcttttgtagaaatatgatttaattttttattaacaatttgtttaatgaggttcatcttattatcctccttcacgcgttcttctatcgaaatatatgagcatatagcttgtacatattcgtatggagtttcttttttcatgaggaaaagaagcgtatgttataatataaggacaaaactacagaaaaagagtaaagggaggacttatggagcaaaagcaacatcgaaaagaaagtgttattcatctcatttatcgtttagttatgattatttttggagcagcatgcgcggcggtagcaattgaactatttttaatgccaaataaaattattgatggtggaattattggtatttctcttatattagattatcttactcctaacatttggtggttaagtttttctactttagtcgttgttctcaatatcccatttatgtattccggttataagcaaattggaaaaacatttatgttatcttcgacatttggtattgtagcattagctttcattgagtcaacgttacatgcggtaccaccatttacaacagaacctattttagcgacagtgtttggtggtcttattttaggtcttggtgtaggacttgtaattcgtcatggtggatcgctagatggaactgaaattatggggattttattaacgaagaaattaccgttctctgttggtgaattcgtaatgtttgtgaacttatttatttttgcatgggcagcatttgtgtttggtgtggaacaagcgatgtattctgttatgacgtactatatcgcatttaaaacgatcgatacagtaattcaagggctagatgaaacgaaggcggttttaattgtatctgatcaatatgaggaagtatcaaacgcgattttgcatcgtcttggccgtggaactacaaagcttgtagcgaaaggtggttacacggataaagaaaaagaagttatttatgcagttgtaacgcgtctagaagtgacgaagttaaaatcaattgtgcatgaaattgatgaaaatgcgtttgttacgattatgagcacgcaagagacaaatggtggtaagtttaaatcggctattcactaaaaagtttataggaatatttttcgaaagcagagaatttttctctgctttttgttataatagtaaggtttcttgaaaaaatagatatattttaggcagattggtttacaactataataagctgtactataattcaaatagatataaatcggaatcattctgaattaaaataggtgagatgctatgaataatatattagaaattgaaggtttaacattccgatacgaagatcggaatgtgttagaaaatattaatttgcaagttccgaagggagcttttttaggtttagtgggaccgaatggttcaggtaaatcaactttacttaagtgtttattaggtgttttaaagccaaaagaaggaagcattcgcgtgtttggcgttgatagtaagaagtttaaggaatggaacaaagttggttatgtatcccaaaaggcaaatagtttcaattctggttttccagcaactgtttctgaagttgtgtcaatgggacttgtttcgaaaaaagggctttttcgctttttcacaaaagaggataagaaaaaggtagaaaaagcaattgctgatgtagggatgagtgagtttcaaggtcgtaacattggagagctttctggtggacagcaacagcgtgtatttattgctcgtgcgctcgttagtgatcctgaattgcttattttggacgagcctactgttggaatcgatgtgaaaaatgtggaaagtttttacgaaatattagaggatttaaacaaaaggctcgggatcacattaattcttgttactcatgatatgggagctgttactgaaaaagtaacacatgttgcatgcctaaaccaacatctacatttccatgggaatgtagagaagttccgagagttagaagatgcagaaatgtccgtcttatatggacatcatgttcatcgtttagaacacgaacatgagcatcacgggaggatataatgatacaagattttttacaatatgactttttacgtaattctttatacgcaggtattttaattggacttgttgcaccgttaattggtgtgtttgttgttattcgtcgtttatctcttattgcggatgcattaagtcacgtgacgttatcgggtattgcagcaagtttattacttgaaaaaaccatttttacaggtgggtttttaaaccccttatatatggggatgattttctcgattggtggagcgctactaatcgaaaagttacgaactgtatataagcactatcaagaattagcaattccaattatcctttcggcagggatgggggttggagttattttcatttcacttgcaaatggatttaacacagacttatttagttatttatttggtagtgtcagtgctgtaacaagtacagatttaattattattgggattgtagcaattgttgttgttgcgacaattattttattatataaagagctgtttctattatcatttgatgaggaatacgcagtatcaactggtttaagagcgaaatggattcactttattttcattatattagttgctcttgtcattgcagtatcaatgcgtgtagtgggggttcttcttgtatcatcattaatgacgttaccagttgcagcaagtattcgtattgctaaaggatttaaacaaacaattttcttttccattttatttggtgaaattgcagtaattggtggaatgtttgcttcgtatcaacttgatctagcgccaggtggtacaattgttatgatagcagttcttattttaatcggtgcgattttatggaagaagaaaaaaactgcataaagtagggataggtatgaatctaacagaagctttacgcctaatgaaagaaaaaggatacaaacatactggaaaaagagaagagatgctcagattatttgcagcacataatcgttatttaactgcgaaagacgttttagagcatatgaaggacgattatccagggcttagttttgatacgatttatcgtaacttaacagtttttgctgagattggtgttttagaacaaacggaattaaatggtgaaaaacattttcgttttacttgttctattatggaacatcatcatcattttatttgtttggattgtgggggaacgaaagagattacttcctgtccaatggattttatgaataaagattttaccggttatgaagtaacggggcataagtttgaaatatatggtcgttgtccaaaatgtgcaaagtaaaagctcgtcggttatataactgacgagcttttttacgtagaaaagaaggttgctcacaaatgttgtggcaaccttctttttattgttcttgtgtctctttttctttttctcgttcagcagccatttcagcagcaattacgtcgatttcttttttcagttcttctaccattgtttcttctggtactttacgaacgacttgccctttacggaataataatccctctccacgtgcaccggcaataccgatatcagcttcacgagcttcaccagggccatttacagcgcaaccaagtactgcaactttaattggtacttgaagtgtagagatgtattcttccacttcgttagcgatgctaattaaatcaatttcaatacgaccacaagttggacaagagataagtgttgctgcgttagacgcaagaccgaatgattttaatagttcacgagcaacttttacttcttcaactggatcagcacttaatgaaatacgtagtgtatttccgatgcctttatttaagattgctccaagaccagcagcactttttacagttccggcaaacaatgttccagattctgtaatacctaaatgtaatggataatcaaaagcacgagcagctttctcgtatgcttcaattgctaagttaacatcagaggctttcatagatacgataatatcgtggaaatctaggtcctctaaaattttaatatgatgtagcgcgctctcaaccataccatctgcagttgggtacccgtacttttctaaaatatgacgctctaatgaaccagcgtttacaccaatacggattggaataccgcgctcttttgctgcatttacaacagcttctactttatggcgacgaccaatgttacctggattgatacgtactttatcaatgccgccttcaattgcttttaaagcaaggcgataatcaaaatgaatatcagcaacaagtggaatgttgatttgtttttttatatcagcaatagcatctgctgcgcgttcatctggaacggcaacgcggacgacttgacagccggcttcttctaaacgcttaatttcagcaactgttgcttcaacatcatgtgtttttgttgttgtcatactttgtataattaattcattattaccgccgattgttaaattaccgactttaactggacgtgtttttgtacgatgagtcatttcattcacgaatagatcgctctccttataaaagaagtttcttatttagtccctcatatcaatgatagtatacgtgatatagggctatagaaaccgaagtactcggtttcacttttactattgtatcagcgcctttatgtaattgacaaggattaagtgatagcttattgatataaggggaatttataagactttccaatttgtatttttgtagcagatgtacttttgtttaattgtttaaagtcgtcaatgactttttctatggaaggaatttttttcttgttaatttgttctgtaatagaaagaactgtctcaccagtttttacttcaattgttttataagatacatccgtttctttttctgttttgttctctttattctgctgactgtctgtgttttcttttttaatcgtttgagcagcagttgtttttttatatgaacttaacatcggtaaagtaccgatttttatatcgtaataaaatatataaccgagaacaagcacgaataggaatatacctaatctcttcatattcttcactcctttgctaggaatatatgcttgtccaaaaaaaaaatgcctatttaggcattttttttcgttcttatttttctttcggttttggaacttctttaatcgttaagtacagaacaattaaaacaactgcgatatagatgaatgttgatccaggtacgacaatcttacatgcatccataatcataaagaagattgttgggattgtgtagctgtatgcagttagtgtccaaacttgtttataggatagtttacgttgaccgctcatagcagaaccgatgaacgcaagtaaagtcacacctacaaaagtgatgaataattggaataggtacactaagaatccaataacaaataataaaattggataaatattatcgaataaagaaataaattcttgtagatcttttttctcaagagatgcacctaacaaatcgttataagaatacgtttgtatttgaccatttcccatagagactactttatcttttaaaacaaataaacctgttttattttgatatttttctaggtctgttgaatttggatcaaatacgaaaagtgcatttccttcttctttttcaataggttgatcaatatcggcttttagttcgccattttcaattttaaaatcaggtaaatctttatcgatgacttgatttaccatgcttacaccatcttggataaaactaccgtacaaaaaagttcttggaatagtagtaattaagcaaagtagcataatatacaaaatggttttaccgattttttgaaaacggaatagcgccatatctttaggcgagtatatgctttttacgaattgggtaaatatggacatagattcacttcctttatgtatgtataaaatcattgtaacgtagtaatctagagaatctcaagatatattatatttacatatagtggagataactaaatttcttttattaactttcttcttttaaataagaaaaatacaattgacacttttcttttctatatggtaaatttatcttacatttcttaaagagcatatccgataggaattcctttatttgatatgttgttacatacataattgtggacccttagctcagctggttagagcagacggctcataaccgtccggtcgtaggttcgagtcctacagggtccatatccatttcacatgtttattatgttagcaggaagcttccttgtagaaggaagctttttttacggaatatatgagcattttaattgaaaagaagtggggattttgctactttaatgatagcaagacaatgtgatttatttgtttgcaccctatggcaattagggtagaatgaagttgtatgtcacttaagtggcaatacataaactgggaggaatataacaatggcaaaacacgaattaccaaatttaccttatgcgtatgatgctttagagcctcactttgacaaagaaacaatgaacatccatcatacaaaacatcacaacacgtacattacaaacttaaacgctgctttagaaggtcatgcagaattagctgacaaaagcgtagaagaattagttgcaaacttaaacgaagtaccagaagcaatccgtacagcagtacgtaacaatggtggcggacatgctaaccatacattcttctggacaatcctatctccaaacggcggaggacaacctgtaggtgaacttgcaactgcaattgaagcaaaattcggtagcttcgatgcattcaaagaagaattcgcaaaagctggcgcaactcgcttcggttctggttgggcttggttagtagtaaacaatggtgagttagaagtaacaagcactccaaaccaagattctcctttaactgaaggtaaaacgccagttatcggtttagatgtttgggagcatgcttactacttaaactaccaaaaccgtcgtccagactacatcggtgcattctggaacgttgtagattggaacgctgctgaaaaacgttaccaagaagcaaaataattgtaacaaatatagaaaaagctaggggagagcccctagcttttttctatgctttccttttacataattgggcttgtctttggaagactagaacatgaagtaaaggagagttgtgtatgaaatggaaacatataattggtgacgttgaagtgaatcgggatttagtgttattgctccttataggaggtttatacacgctcgcaatttctttatcgaatacgtttgtaaatatttatttatggaaacaaacacaaaattatgtgaatcttggcttgtataatttagccagcgtggtattacagcctctcacatttcttgtaggggggaaattagcgaaacgtatcgatcgctcgattttattacgaataggggtaggaacgctcgcaattttttttatcgttgtcttagtagcagggaaaagtgcttctcagtatattctattaatgggggctcttttaggagtaggatacggtttttactggttggcttttaacttattgacatttgaaattacagaaccagaaacaagagatttctttaatgggtttcttggacttcttacatccttctctgggatgattggaccaatagcagcaggatacacaatttcacgtatggagaaatggagtggctatactgttatattctttctttcattagttctatttgcaattgctgtcgtcttaagcttctttttatctaaaagagaatgtgaagggcgttatgaaatcgtgcaagtattgaaagaacgacggattgataaaaattggggaaagattacacgagctcattttttccaaggattgagagaagggacgtttatttttgtcatttcagtatatgtttatttagcaactaatagtgagttcgcattagggaaatacagtttagtgaactctgctgtatcctttgtatgttattacttagttgctcgtatgttaaagaaggagtggcgaaaaaaagcaattttacttgggggcattattttatatgctgtcgtctttttagttattttcaatgttacatacacgaaattacttatttatgcggcatgtattgcgattgcatatcctattttacttgttccgtacggatcaatgacatatgatgtaattggtagagcgaaaaatgcgagagaatggcgtgtggaatatgtcgttgttcgggagttatggttaaacgccggaagaatctgttccattttaagttttttatgtgctgtactattctttccacctgaaaaaagtttaccttacttattatgtattttaggtgctggacattttcttatttattttgcagttaaaaatgtcaaatatgatgagggaaatgcgagtaaaacaagtgttgtaacgcaagagaacgcgcaaaaccaaactgaaccagaaggttaacttctcgtttgttttatgctagaatagaaaaagatgtaagacagcagtgaggacacctgtatgagggtgtccctttcacattacatagctgttggtagagggggtttgtatgagcaagaagcagaagcaaaataagaaaaagacccacgttccttttcgattaaacgtgttgtttttctgcgtgtttttaatgttctccgcggttattgtaaggctcggatatgtacaaattgttcgcggtgaagaatataagaatgaagtggagaagaaagaaaactcaacgataagtaatcctgtaccgcgtgggaaaatatttgaccgttatgggcgacctgtagtagataatgcagccattcgtactattacatttacaaaaatgaagggatcaactgcagaggatcgcttagaaacagcgaaaaagctagcagatttgattgaagtaccgacagataaattaacagatcgcgataaaaaagattattggcttgctatgcataaagaggaagctaaagaaaaaattacgaataaagatcgtcaagagtttaaagataaaaaaattgatgataaagaattagacgagcgtcagagaagtcgtgtaacagaagaagagattaatcaattatccgccaaagatctagaaatactagcgattaagagtaagatggacggcggatatgcaatgacacctcaagttattaaaaaggatgctacagaaaaggaatattcgattattagtgaaaacctagcagcattaccaggtgtagatacgaatgttgattgggagcgaaaatatacgtacgatgatttattccgaagtgtacttggtggggtgtcgacatctgatgaaggcttaccgagagaaagactagattactatcttgttcgtgattacaatcgaaatgaccgagtaggaaaaagttatcttgaacaacagtatgaagatagcctgcatggtacgaaagcagaagttagaaatgttacagataaaaacggtaatattttagaaacgattaatgtatcaaaaggacaaagtggtaatgacctgaacttaacaattgatatggaattacaaaagcgcgtggaagatattcttgcgaagaatttaatgaggtttaaaggaagtgaacctcttttagatcgcgcatttgttgtaatgatgaacccaaaaaatggtgaagttttatctatggcggggaaacaattagttaacgaagatggtcaaacgaaagtaaatgactttgcattaggtaccatgacaagttcttatccgatggggtcaactgtaaaaggtgcaacagtacttactggatatcaaactggtgcgattcaaccaggggcagtacaattggatgaaccaattaaattaaaaggtacacctacgaagtcgtcttggaaaacgatgggatacattaatgaccttacagctttaaaaatgtcttctaacgtttatatgtttaaaacagcgatgaatatcgccggtgttccatatgtgagaggtggtacgttagatatacctcaaaaagcatttgatacgatgcgttattatttcggacagtttggacttggtgtaaaaacaggaattgatttaccgaatgaatctgctggtcagatgggtaagagtagtcaaccaggtttcttactagatttatcaattggacagtatgatacgtatacaccgcttcaattagcgcaatatatttcgacgattgccaatggcggatatcgtatgcaaccacaagttgtaaaagaaattcgtcaaccggcagtgaaaccagatgaagttgggaaagttgttcaatctatggaaccgaaagtattaaatcgtattgatatgccggaatcgcaaattaaacgcgttcaagaaggatttagacaagtgtataatgattcaggtggtacagctacaaagtactttacaggtgcaaaatataaagctgctgggaaaactggtacagctcaaactgtgtatggtggagataaagagattggtagaaatgcaaaaggtgaacgtgtggaaacatataacttaacattagtaggttatgcgccacttgaagatccagaagtagcattctctgttgtcgttccatgggtacatgatgataagactggtattaatggatatattggtcgtgaaattatggacgcttactttgatttgaaaaacaaagaagtaaatggtgaagctccaaaagatgataaagacaataaaaacaaagatcaagatgatgaataaaaaagttgtaaaaaagcacactatatgaaaagatagtgtgcttttttttatggtttatgcatatcgtgtaataaatgtggacaagtatacaacatttaaaaaacgcggccctataaatgatacttgtatatggtgggataggggataaatattttatagggaaatcatcagaggaaatgaatagctactactgaattaaaattgtatcgtatgttgatttttgtggaactttacaaaacttttacaaacaattaaaaccgaattaatagtttagcagtattcttatatctgtaatcctgttatttccggttacttctaggaggaagaacacgtgaaatggatgcatacaccgattaagattttcgtattatcaatatggttcctctgttttgaaatgtctactgcatttgctttaaatgatacgggagaagtgagagttgatggatcctcaacggtttttcctattatagaagcagtagcggaggaatatacaaaggtgcatccagacgtgaaaatttccatcagtatttctggaactgggggaggatttaatcgtttcagtaaaggagaagtagatataaataatgcttcgagagtaatgaaacaagtcgagaaaaatgaaatgaagaaaaactctattcagttcacaccttttgaggttgctaacgacggtcttacgattgttgtgaatcgccataatacatgggtagacgatatgtcagtagacgagttacgactactttggagtgaaaatggaagagagaagcgatggtcacaaattcattcaacatggccacgtgaacaagtgaagttttatgcaccaggcgtagactctggtacgtatgattattttcaaaatgtcatcttacaaaatcatcgcattgtaaaaaaagtctctttgtctgaagatgatcaagttattatgcaaggggtaatgaatgataaacatgccattgcttttgtaggatatgcttattatatggctaatcgagataaggtgaaagcaataaaagtaaatggtgtatttccgacgaaagagaccattcaatcaggtaagtataagccgttatctaggccgctacttgcttatgtgaataatgcatctatccgaaataaaatgaatgtagcaaactatgttgagtttatgattcagcatgtcggtaacctcgctgaagaggtcgggtatgtaaaattacgaaaagaaaaatacaatgaacagctgcgtatgttaacagaaataaaaaggtaatgtcagggtggaaaggggttttcatctttggctcataatgacaaaagtcaaattacattttctgtacaacatttgattgaaagaaatacaaaacaaagaaaaaaaaagcagcgaatcaatcgaatagtgcctttattactaaaaataattgctagcgtttctattgtgacgacacttggaattgtttttacgctctctaatgaaacaatcatgttttttcaaaaaatatcattatactcctttttgacggagaaagaatggttaccattttttgaagaccctaaattcggtatattaccactcatatgtggaacgttccttataactgcaattgctatgtttgtagcaattcctatcggtttagcgtgtgccgtatttttaagcgaatatgcttcaaatagtgcacggaaaatattaaagccgatgttagagctattagcaggtatcccgacaattgtatatggtttttttgcattaacaattgttacgccgcttttacaaaggcttataccagatttacagttttttaatgcgattagtccaggaatcgttatcggatttatgatgatgcctacagttgcatctctatctgaagacgcgatgagagctgtgtcgaaagggacgaaagaagcttcattagcactcggggcgacgcggtttgaaatggtaaaacaagtggtgtttccgtccgcttttacagggattatggcagcaattatattagcggcttctcgtgcaattggtgaaacgatgattgttgtaattgcagcaggatccacaccgaatgtatcgcttgatccgacacattctattcaaacgttaacagcctatattgtgcaagtaagtttaggtgatgctccgcatggaacgattacgtattacagcatgtatgctgtaggtgcaacgttatttttgtttacctttattatgaacatcatttcgcagtctattatgcgccgttttaggaggatgacataatatgcgaatgttgaatcataaaaaaatacaaaaaaacatggcatcacgctttttaaaagatcgaatttacaaattgttattttatatagcaattttattttcaatggtaattttgtttttgttactgtttcaaattgttgaaaaaggtataagttatctttcaataaatttctttacaaatttcgcttcacgtaatccgaaagaagctggtattgctgcagctttgtcagggacaatattatttatgagtattgttatacctgtttcttttatatttggagttggaacagcactttatttagagcaatatgcgaaggaatctctatttaaaaaaataatagagattaataatcaaacgttagcaggagtaccatccgttgtatttggattgcttggtttaactatttttgtatatgctcttcatttaggagagagtatagttgcagcagcactgacgatgagtctactcgttttaccaacagttgttgtggcgagtcaagaagcaattcgatcagtaccaagtgtattattagagggttcttacggattaggtgctacgaagtggcaaacgatgtatcaaattgtattgccatatgctttcccagggattataacgggctgtacgttagcgatatcaagagcaattggagaagctgcaccactattagttattggggcacttgcgtttgcaaattatgttccatttagtatgtttgatagatttacagttctaccaattcaaatttttaattggatgagtaggccacaagaagaatttcagtatgtagcagcagctgggatgattgttttgttaggtttgttgctatttattaatatatttgttttatggttacgaaatcgaaaataagttggaagtggatgaaaggggaattcaaatggtagcaacagtagtaaatgtacaggtgaaaaacgaagagaaaatcgagactgcgccaaagaaggtagtatttgatacgaaaaacttaaatttatggtatggggaagaccatgctttaaaagatattaatttaagtattcatgagaatgaagttacagccattatcggtccaagtggctgtggtaaatcaacttacttaaaaacattaaatcgcatggtagaattagtaccgattgttcgaactacaggtgtaattgaatatagagaacgcaatatatttgataaatcatatccagttgaagaattaagaacgcatgtaggaatggtgttccaaaagccaaatccatttccaaaatctatttatgagaatgtagcatacggtccaaaaatccatggtattcgtgacaaaaagacattagatgaaattgttgaaaaaagtttacgtggagcagcgatttgggatgagttaaaagatcgtttgcacgataatgcatacggtttatctggtggacagcaacagcgtctatgcatcgcacgctgcttagctattgagccagacgttattttaatggatgagccaacatcggcattagacccaatttcaacattaaaagtagaagaattaattcaagagctaaagaaagattttagtattgttatcgtaacgcataatatgcaacaagcagcgcgtatttcagacaaaacagctttcttcttaagcggggaagttgtggagtatacagatacaaacaaattatttacgactccttcagataagcgtacagaagattatattacaggtcgctttggttgatatcgtttcaaagctaagagcaaatgccctcttaacagagggcatttcttattttatcttactgttaatagagaactaatacttctccttatcttaaggtttattacaagcgcaagaggctatgtaggagatttaccccgctatttgcgggcagtaagacccccaccttaaaatttagcgaaagcaaagaagttagggaggggatcttgctgcctatcaaatcccgattgatgagggttgattaaagtttcacttttatataatggcacataatattgagggggaagaaaaatggtaagagaacagtttcaaggtgatttaaaagcgttacagcaaaaggtgatcgagcttggagaattagcaaatgcggctttattgatggctatggaaggtctgcatacaagggatgtagagaaagcgttagaggtcattgatggtgattaccgcatggataatttagaagaggaaataaacgatcttgcgcttatgctcattacgaagcagcaacctgtagcaagtgacttaagaaggatttttatttcaattaaaacagcgacagatttagagcgtattgcagatcatgctgttaatattgcaaaggctacaattcgtcttggggaaaaagaagtggctgttagtttgcacaacctggatgaaatgtttgcggttgcaaatgagatgttgcatttagcgctagaagcatatgaacaagaaaatttaacttttgcgaaacaaattgctgaaatggatgattccgttgatgaaatatatggaaaagcaattcgtgagtttatatcgtcggttccggaacaaccagaagcaattacgcaaattacacaattatcatttgtcgcgagatatattgagcgtgtagcagatcatattacaaatattgctgaaaatgtcttttatttagtaaaaggaaagcattatttattgaatgagtaggaataaaagcaggtgatgagaaatcacctgctttttttagtcaaaacatgacaaaaaaagctcgttgtttcctttagtttatgatgataagatgtatcataatgtaatggaaaaattagtatatatgtttgtcgttaataagtattatttaccaatttatagtaagcgctttcttgttgtttgaaacatacgtttttataggtgagaaatttaattatatggtcttctaaatgaggatttgtttaactaatcaagtttatgctgctagttcatgtgggatagggaatatacatatggtatatggagttactgaacattatataagtggaggctgaagtatatgaagggggttattttagctggaggaaaaggaagacgccttagaccattaacatgcaatactccaaagccgatgttaccattattagaaaaaccagttttagaatataatattgagttattacgtcagcatggtattcgtgaaattgcaattactgttcaatatatgagtacgaccattaagcaatattttggtgacggtagtaaatggggagttaacttgtattattttgaagactctcctccgcttggcacagcagggagtattaaacaagcagaacaatttttagatgaaacatttgttgtgataagcggggatgcattaactgactttcaattatcagaaggaattaggtttcatgaacaaaagaaaagaatggtaacaatgtttgtgaaagaagtagaaaatccactctcatttggattggttgtaatgaataaaaaccaggaggttacacgatatatagaaaagccgggctggaatgaggtagtatctaatgttgtgaatacaggcatatatattatggagccagaaatcttttcttacataccgcctaggcaattttttgatttcagtcatgatgtgtttccattattggcaaacaaaaatttgttattcgcatatttgtcagaaggttattggttagatatcggcacatttaatcaatatcgacaagcacaatttgatttgttaacgaaaaagttacaagtacctattccttatacagaagtattacctatggtatggatgggggaaggggtgacgattggtaaagggacgaaaattcatggcccctcttttattggagaaggagcaaagattggtacaggagctgtaattgagccatattctattattgggaaaaatagtatcgtttcaagttattctcatcttcaaaaaagtattgtttttgcgaatgcccacattgggaagtattgtgaactattagaaacgacaataggagagcgtacaatagttgaagatgatgttacactgtttcaaaaaagtgttgtagcggatcactgtcatatcgggagaagtacggtaattaagcaaaaaggaaaactatggccttataaggcgattgatagtcattcgatagtaggagcggctggtattcaagagagtgaaatgagtgcagggtggttacaaaaaagccgcattgtaggaagagggaatgttgaaattactccccagtttatcgtgaagattgcgatggcgtatggttctctttttgaaaaaggagaaagtatattaattggaagtcaagaaaatatagaaacaacctcttataaaaatttatttttacatgctattcatggtatagggattcatacgatggaatgtaaagaaatgaacgagtcactttttcaatatagtgttcatcatttgcaatgtgcaggtggtgttttcattcaagtggagaatgagaatgagattgttataaagttatacggtcaagctggcatgccgttaacgtataagcagcaaaaagagatagaacaaatatatatgtccgaattgttttattacgtgcaggagaaagaaatggggcgtaataagctcgttcatgtttctatgaatgagtatatagaagttatattggagcatattgatatcgagaaaatacagatgcagaagtttcatcttcttattaataagagaaatgatacgttgcaacatttacttatgctctttctgcaaagacttggttgtacagttacatggatttatgcaagcgaacaaaaagatcatgtgaaagctttgatgaaatcaagtaaagcgaatatggctcttatgttttcggagaaaggaaatcatttcgagttatacgataaacatagtaatatttaccaaggtacagattttgaagaggtagatattccagatttcttgctcgaatcgacaggaaatatttacccaatgtctttgaagttaggagaatgttatcttctattttatacgcaggatgaaagaaaatcgtttcaagtgaggtggaagcgagatattttatatcggattggaaaattattcgagctaatagcattgcaaggaaaaacgtttctcagcatagtagagcaatcacctccgctctatttactttatgatgaagtggtatgttcatggaatgaaaaaggggaaattatgaggaaattattggatgatatagaaaggaagggagaagggatatttgaaggagtgcagttcaaatatactgaaaaagagtggtcttatatcgtttctgacataaaacaaccaaaatttttggtgtattcacatgctagaaacccagtaatagcaagggaaaatatgaaaaatcttatagaaaaaattagacaatatcaaaaggtgtagaatttttattttaaaagtggtattatagtatagtctgatttaagttattagtactggagggaaataagaatgcgtgtgaatattactctagcatgtacagaatgcggagatcgtaactatatctcaaagaaaaataaacgtaacaacgctgagcgtatcgagcttaaaaagtattgcaagcgtgacaagaagtctacgttacaccgtgaaacaaagtaagcagtaggaatattttcctactgtttctttttttattcgattcctatgttaaaagtgatacactatcagcatagagtaaagtgtcactgtaagggggagaatgtgtgaaagcagagaaagtacgtttgcgtaaacaaataatagaacacatgaattctttatcagaagaacagtatacaactttatcagaacagattgtattttcgttgtatgcgcaaaaagagtgggttgaagctaaaacaattggaattactctttcaatggaaaatgaagtgaatacatatcctattatcgaaaaagcttgggaagaaggaaagaaagttgtagttcctaagtgtaataaaggaacaagaacgatgtccttccggcaaattaataattttgatcaattagaaacggtgtatatgaatttacgtgaaccgattcccgggcttacggaagaagtgaatatggatgaaattgatcttcaaattgtcccaggcgtagcttatacagaacgaggagagcgaattgggtacggcggtggctattatgatcgttatctcgtgcattataaagggaaaacgctgtcattagcgtatgattttcaaatggtaaaacacattccggtagagccatttgataaaaacatagaaaaaattattacagaaaaaggaacactgcttacaaataagcttgtatagacaaataaaaattgacgagactttttcttcttgattataataaaatatgtgaacgttttcttattataattttttatagtaagtgagcatagagggtgatgaaatggtatctatttatgatattcagcaattgctaaagaaatttggtacgattatttatacgggagatcgaattgcagatttacaattaatgcaagatgaattgcgtgaattaaatcaatcacagctaatcgatccacaagactatcaaacagctttatttttattgaagcaagaaattcaaaaagagctaaataagaattagataaaggtaggtaagcaacatggaagagaaatggttagttggtgttgaccttggtggtacaacgattaaattagcatttattaatgtgtacggtgaaattttacataagtgggaaatccctacgaatacaggtgagcaaggaaaacatattacacttgatgttgcgaaagcaattgataaaaagctagaagaattaggcgaattgaagagcaagttaattggtattggtatgggagctcctggtcctgtacatgtggcgtctggaatgatttatgaagcggttaatttaggatggaaaaactatccgctaaaagatttattagaagtagaaacaggattacctgttgttattgataatgatgcaaacttagcagcgcttggtgaaatgtggaaaggtgctggtgaaggtgcaaaagatttaatctgtatgacacttggtacgggcgttggtggtggtgtaatcgccaatggtgagattgtacacggcgtgagtggtgctgctggtgagattggacatattacagtcgttacagaaaatgctttcccatgtaattgcgggaagtctggttgcttagaaacagtagcatctgcgacaggtattgtacgtgttgctatgcaaaaaatacaagagactaataaagagagcatgttgcgttctatgttagctgaagaaggacgtattacatcaaaagatgtctttgaagcacttggacaaggtgatgaattagcaggtgaagtagtagaaaaagtagcctcttatttaggattagctgtagcgaacctttctagtacattgaacccagagaaaattgttattggtggaggcgtgtctaaagctggagatgcgctattagaaccaattcaacgctatttcgagcaatacgctttctcacgtgctgtaaagagcacgaagttagctattgcaacacttggtaatgatgcaggtgttatcggaggagcttggcttgtaaaaaagcacaaatacgaagcgaagatgatataagttgtgaaatatgaaaagaggaagggggaacccttcctctttttgtgtgaaatctcgatgaagaataaagtgtaaacgaattaagctgctggtggatacccgttatatagaacagtcatgatcgtaaaccatccgaaaacgagtacagttgcaattgcaaagccgctcgcgaaaaagtttttttcacgaagtgttctaagcgtagcaaatacagctaacagagtgacaagtgtaaaaataataacaaggcccatacaatatcctcctctgtctacccatttcttattatgagtttttggaatatttactcttttatattgtacatgttttaaaaatgattgtcgagatagcatcctttcttttcctcagagaaagaaatgttgtatcattaaaagtaagtttaataactggaggagattttcatatgaaatggatacaaatgccgttaggcccattacaaacgaatgcttatattttaatgaacgatcaaaaagagtgcattatctttgaccctggtcatgaaggtgaaaagctcgttacatatttacaagaagaacaattaaaaccattagctgttttattaacacatgctcactttgatcatatcggtgctgttgatgcggtaagagacacttttcatattcctgtgtatgtacataaagaagaagcagattggttaggagatgcaactgtaaacggctctcaaatttttatgatgaaccgcagtattacagcaaaaccagcggatcatattattgatgcagaaggtacattaacaattggatcatttaattttgaaatttttgagacaccaggacattctccaggaagtatttcttattatagtaaagaggcgaatgctgtattctcaggagatgtattgttccaaatgagcattggaagaacagatttacctggtggaagtttcgctgaattaattggaagtattgaagagaaattatttgtattaccagatgaaacagcggttttatgtggacatggtccagaaacaagcattggctttgaaaaagaaaataatccgtttttacaataaggagtcattatgggaatggagctcattttaagagaatggatggggaaagaaaaggattattcaatttcatatagtacgtatatgaaccttgtattgtatacagaaggtcatggatattatatgaaagaacgtgaaaagattggaagacaaggggatttttttacaagtagcaacgtatcctctgtgtttgcaaaaacttttgctaaactttttattcgtcttgttgaaaatggtgaagttgctccgaatatttgtgaaattggcggaggaacagggaagtttgcctatgatgttttacaagaatggaagcaattatctccaaaaacctttattgatctaaactattcaatgattgaagtgagcccttttcatagaaaattacagcaggagcaccttggctcattttctaatgtatcgtactatacctcctatagtgaaatgggagattctttcgagggaattcttttttcgaatgagttgtttgatgcatttcctgttgaaataattgagaaaagaaatggtatgttgtatgaagtacgtattacatatacagaggaaggaaacctttcagaagtatgtaggccgttagataaaagaattggtcgctatttattgaaatataatattcatattgctgaagggcaacgttttgaagtaccaattgtgatggaggagtatataaaagaaattgcgaaatggtttcaaaaaggtatatgtattacagttgattacggatacacaaaagaagaatggatgtatccagcacaccgtgaaggaagtttgcgagggtattatcagcataagctaatacgtaacccactagcgcatccaggtgaaatggatcttactactcatattcattgggacgagctaaaggagatgtttagtatgcaaggaatgagtgcagtatggcataagaaacaatctgagttcttgttagctgcagggatattagaacagcttacgagccatcaagatatgaatcctttttctgaaacgcaaaaacaaaatcgagccgttcgttctatgattttgaatggaggagtagggagtgcatttgatgttgttatacatacaaaagatatgcaacatttacatttggatcgatatgtaacaatataaaaaaacaagacacagtatatactgtgtcttgttttttaatacgacttatgtagtattatatatttcctctcatgatatatatttatattaaagatatgagatgaaaaatatagaatacgttctttttcttcgattattagtccctaacctaataatacgcgaacgagttgaatgattgtttcattctctactttgtaataaatttccaatccttttctttcactagaaacgattttagcgctttttaattttgctaaatgctgtgaaattgtagattgtggcatgtttaagccagtatacattgtagaaacgttgcttggaccgcgctcgattaatccttttacgatacataaacgaacaggatgagctagcacttttaataattctgcattactttcatatagttctaattctttttgaaaggtttctaacatgttcttttccacctccgtgtgagctattataccatactatacataccaaaaatttaaagaaaagaaaatagttgttgcagaaaaaaagtcctaaagtaaagaaattgtaagaaaagagaccctgatgtaaataaaataggtaaattagcatgtttttgtaaaatgacatttttgggtgaaaatttcgatgtgttttaaaaattgaaagatatagatatatttgtaacacaattttatcatgattttcttattctttcaaatgaatatacaaaatttttaaaataatatgacaaaggaattataatgatatatatagaatataaaacaggttaaaagaaaagaagctgaatgtaattcgcttctttatggtgataatgaaatatttgcttacggctgataaatcttaggatgatcaagtcattagtcatttattctaaaattcatcttttagcaacgttaaaaacctgtgattccatatgttctcataaaaatcaattgtctcttttgcggacataaaaggattattcaacgtagaggttgttttctgtaccataaagttttcgtatcctagtccgtgggcaaacttaatcgtagcatccatacagtactctgtttgggcgccacaaaattcaatgcaatttacagataattgatctaaaatttcttttaagtttgttttataaaatgaatttgcatgtgtttttcttacaaaaaaatcttgttcttgaacatctagatcggtatgaatagcccaaagttctttctcgggtactaaatcatcatcacaatgttgaacaaaaaggattggtttatttaattttctgtatgaataaattcttttatttacttttgttagtaagttctgtaaatcaaataaatgctcctcgctataacatacgccattttgtaaatcgataacgattaaaatatctgaacaaatatccattattttcacccctttttatttcttaatatatcaattaatccattatttagaaatagatgatatacttttatttttttatggactataagaaaagaagaaattcaaatgaatataactaaaacgcagaaaaagaagatatgaaaacctaatctcatatcttctttttctctatgcatttacaggttcttctacataagaaagggcattttcaaaatcggatattaaatcgttaacattttcaagaccgactgataaccgaagtaatgaattagagattcctctttcatcacgagcttcttgcgacagtgctgcatgtgacatttttgctggataagaaagaattgactctacagctcctaaactaactgcaaaaacaggtaattttacttttgataaaaattggcggagtgcatcttctgactgcaaagtaaacgataagaccgctccagctgatgttgcttgagattgttgaatatcaaatccgagatgtgtttgtaatcccggataatagacattttgtactttagcgtgctcttgtaaataatgtgcgattttattggcatttttagctgaatgctcgaggcgtacgtgcaatgtttttagaccgcgaagtacgagagaacaatcttgaggtcctaaaatagcaccgaatgcattttgtaaaaatccaagcttttgagcgagttctgcatcttttactactgctaatccggcagtaacatcactatgaccagcaataaattttgtagcactatgaagaacgacatcagctccaagttcaagtggtttttggaatagtggtgtcaaaaatgtattatcaacaaaagtaagagcgccaatagattttgcgagtttagaaacctcgcgaatatctgtcacttttaaaagtgggttagaaggtgtttctacataaaagagctttgtatttggtttcatgttttgttttatttcttctaaattggtcatatcaacaaatgtatgtgaaacaccgtaacgggagagtacctcagttatcactcggtaagtgcctccgtacacatcttctgaaatgagtacgtgatcaccttgtgaaagaaggaggaatgcagtggaaatcgctgcaatgcctgatgcaaaggcgaatccttttgttccgccttctaataaagtaatgatatcttcaagagcttcacgagttggatttcctgacctgctatagtcatattttccgaacgtatctacatcaaactggtgaaaagttgatgtgttataaataggaacgttcacagcgcctgtttgcgagtcatgtttatattggttgtgtagtaagagtgtatctatagaatagctcatattcttacaccttcttttacgagtttaatggcttgctttaagtcttgaattaaatcgttactattttcaatgccaactgagaatcgaagaagacgattgcatacgccgtttgctgttctaatttcttcaggaatatcagcatgtgtttgcgttgctggataagtcattaaactttctacaccaccaagactttcggcaaatgtaattaaggataaagattgtaagaatggattaatccaagcttcatctttaaggcggaatgaaatcatgccgcctcttcctggataaaatacatctgtcaccccgtcttcatcatttaaatacgcaacaactgctttcgcattttcttcatgttgtctcatgcgaagcgctaacgttttcataccgcgaattaataaccatgagtcaaatgggcttaaaactgcacctgatgcattatgataatgagcgatttcctcgcaaagttcctttccttttgcaacgacaagcccgcttagtacatcgttatgtccccctaaatatttcgttgcgctatgaagtacaatgtcagcaccttctgttaatggttgctgtatataaggtgtgtagaatgtgttgtctacaataagaagtagtccgtgccttttcgctacagttgcgacagcagcaatatcagtaacttgcattaatggattagttggagtttctatgaaaatagccttcgtttcagttgtgatagcttgctcaatttgtttaatagactgtgtatttacgtatctacatcgaacattccactttttttcatgctcagaaaataatcgatacgttcccccgtataaatcttcagatacaataagttcgtctccagagcggaatagagaaaggacgaggagaacagccgccatccctgaactacaggcataaccttgttcgccatattctaagtctgcgatcgcctgttctaaaagaccgcgagttggattgccagttcgtgaatagtcaaagccagtagatttaccaattccttcgtggcgataagcggttgagaaataaactggtggattaaccgttccagttgtagtttcactacgatttccgatttgtgctagttttgtttcgattgttgacatgtgaaaattcctcctttttaaattgaaacattaagtgaatataaaataaaaaaagccttctaagaagaaggctttcggtttgaatagagtcttcttctcatctgtcaaatctttcacaatttgctggaattagcaccttattaacaaaatgttaatggttgctgaggcgtcacagggccagtccctctacctctctagataagaatgttcgtatgaaatttttattatgtttttaactttacaataaaagataattgaattgcaactttattttaaataatttttatttttccgcaagtgtcattgacttttaattttgtgcatgctaaatttattaaaaaattaacaaacattgttaaaaggggaacgcatttccttttagctacataaataaaataataaagacaactcttattgagagcggtggagggaaaggccctgtgaaacccggcaaccttcaaacgaaatgtttgaaacggtgctaatacctgcaaaacgaatgttttgcataataagaggaggaacaattatgtccccctcttcaaagtgaagagggggtttttatattgatagaaatgagggagattcgtgaaattactagatttattatcaaaaggaattgtaataggtgatggtgcggttggaacgttattgcattcacatggtttgcaaagtagctttgaagaattgaacgtatctgatccagatctaattatatccattcataaacaatatgtagctgctggagcagatgtaattcaaacgaatacgtatggagcaaatgaggcgaaattacgtatgtatggtttagaaaatcaagttacaaaaattaatagagcggcagtgaaattggcgaaagcatctgtgacagataaaaatgcaattttaggaacaattggtggtatgaaacatatcggagctgttacaacgactgatatggaaagggagtttatgttacttgaacaggcgggggctttactagaagaacaggttgatggattactattagaaactttttatgatgaatttgaattacttcatgctgttaaagtgttgcgtaagcaaacgaatattccgattgttgcgcaattagcgttacatgaagcaggtacgactcaaaatggaaatgatgtcaatgaaatattaaagcagtttatagattacggtgcaaatgttgttggattgaattgtcaactggggccgcttcatatgacggaagctttcaaaatgatatcgattccgcaaaatggctatttatcagcatacccaaatgcaggtctcccgaattatgtagagggacgttacgtatatgagggaagtccagcttattttgaagcaatgacaccgaattttattgagcaaggtattcggttattgggtggctgttgtggtacgactccagaacatattcaaagtatgaagcgcgctgttgcgaatattacccctgtaatagaaaaagaaacgattcaaaggccaaaagtcgttcatacgcatgagaaacgttcgaaggctcacgtcactctagcagagaaagcaaaaaaacaaacgacagttgtagtggaattagatccaccgaaaacgttagatacacagcgtttttttgaaggagcaagagcgttaaaaagagcgggagcagatgctattactctagcagataattcattagcatcgcctcgtgtctctaatatggcgatgggtgcgttattaacgaagcatgatatcccagtattgacgcatttaacgtgtagagatcataacgtcattggactacaatctcatttgttaggtttatcggcgttagggatggaagaagtgttagctttaactggtgatccagcgcgcgttggtgattttcccggtgccacttctgtatatgatttatcctctattgagcttattaaaatgattaaagaaatgaacgatggacgttcaattttagggaaatcaattggaccggcgacaaggttttctgtaggcggcgcatttaatcctcacgtgaggcacttaaaagcagcagttaagcgaatggaacgaaaaatagatgctggagcggagtattttttaactcagccaatttacgatatcaagttaattgaagaagtgtatgaagcgacaaagcatttggaacaacctatttttattggaattatgccgttagtaagtaagcggaatgcagattttcttcattttgaggtgccgggtattactcttcctgaagaaataagagagagaatggatggacatgaaacgaaagaggcagcaattgaggaagggattcgcatttcacaagaattggtcgacgcagcgatgaaatattttaatggtatttatcttattacaccatttttaaagtatgaaattacagaacatcttgttaaatatgtaagagaaaagcaagaagtgaaagaaggtattaattgatgaagtgtatagaagaaaaattgaaaaatagcattttaatattagatggtgcaatggggacaatgattcagcaagaggatttaactgctgaagatttcggaggagaagagtacgagggctgtaatgaatatttagtggaaacaagaccagacgttattttaaagattcataaagcttatattgaagctggagcggatattattgaaacaaatacatttggggcaacgaatattgtactaagtgattatgagctgtctcatttagatgaagaactaaatgaaaaggcagcacttttggcgaagcaagctgttaaagaaagcgggaatgaagtatatgttgcgggagcgatgggaccaacaacgaaagcaattagtgttactggtggtgtgacttttgaagaattgattgaggcttatacaaggcaggcacgaggattattaaaaggagaagttgatgtattactcgttgagacgagtcaagatatgcgtaacgtgaaagcagcttatattggaattcaagctgcttttgaagaactgaaaaaaacggttcctattatgatttcaggtacgattgagccaatgggaacgactctggctgggcaaacaattgaagctttttatttatcagtagaacatatgaaaccattatctgttgggttaaactgtgcgactggtccggagtttatgagggaccatattcgttcactatctgatttatcggagtgttacatttcttgttatccaaatgcaggtcttcctgatgaagatggacattaccatgaatctccatcttctcttgctgaaaaggtgaagcgatttgctgaagaagggtgggttaatattattggtggttgttgtggcacgacaccagaacatataaaagcaatgaaatccgcgctagcatctcttaagcctcgtgaccatcatgagagagaaggacatggaattagtggattagaagcactgcaatatgatgagtctatgagaccgttatttgtaggtgaaagaacgaatgttattgggtcacgtaaatttaaacgattagtagcagaagggaaatttgaagaggctgctgaagtggcaagagcgcaagtgaagaaaaatgctcatattattgatatttgtatggcagatcctgatcgcgatgaaatagaagatatggaaaacttcttagcagaagttacgaaagttttaaaagtaccgattatgattgattcaacagatgaaaatgtgatggagcgagctcttacttatattcaaggaaaagctgttattaattcaattaatttagaagatggagaagaacgatttaaaaaagtgacaccgcttcttcagaagtatggtgctgctatagttgtaggaacaattgatgaagacggtatggcggttagtgcggagcgaaagatagaaattgcgaaaagaagctatgaattacttacaaagaagtatgggatacgcccgtcagatattatttttgatgcacttgtgtttccggtagggacaggtgatgaagaatatattggttcagcagcagcgactatagaaggaattcgccttattaaagaagcgttaccagagtgtttaacgattgtaggggtaagtaacatatcatttggtttaccaccggctggacgtgaggtattaaattcagtctttttatatcatgctacgaaagcagggttagattacgcgattgtgaatacggaaaaattagaacgctatgcgtcgattccagaggaagaaaaacgccttgcagatgcactactgtttgaaacgacgaaagagacgttagaagaatttacaaacttttaccgagttgctaaaaagaaagatatcgttgtgcaagaaacgttaacgcttgatgaaagactagcaaattatattgtagaaggtacgaaacaaggattacacgaggatttaagtcttgcgcttgaagaaggaagaaaacctcttgatattattaacggtccgcttatgacagggatggatgaggtaggacgactatttaataataatgaacttattgttgctgaagtattgcaaagtgctgaaagtatgaaagctgctgtaagctatttagagccacatatggaatctagtgatagtgcgaaaaaagggaaagtattattagcaactgtaaaaggtgacgtgcatgatattgggaaaaatctcgttgaaattattttagcaaataacggatatgagattattaatttaggaattaatgtacgttcggatcgaattgttcaagaagtacaagaaaagaagccggatattataggcctttccggtttattagtaaaatcagcgcaacaaatggtaacgactgctgaagatttaaaagcagcaaatattgatgttcccattgttgtaggtggtgcagcgttaacgagaaagtttacagataatcggatttcaccatcatataaagggctcgtttgttatgcgagtgatgcgatgacggggctcgatattattaataagcttcaaaaagaagaagagcgtgagaagatgaaacaggataaaaaagaacgtcatcttcatatcgtaaaaaaagaggagaagaaagtagaaattccagcagtaattgagtcattaccgaaggctgaagttatcgtgcctgattcaacaaaacgaattgtattacgcgatattccggcccttcatctcgctccatttttaaatagacaaatgctacttgggcatcaccttggattaaaaggaaatgtgaagaagcttttgaaagagggagataagagagcacatgaattaaatgatttaatagatgaattattgcaggaaggacaatcttggttaaagccgaaagcagtgtatcaatttttcccagcgcaaagcgacggacaaaacattgtaatatatgatccagaagatcatacgcgtgttatagagcgtttcacattccctagacaaggaaaggctccctatcgtactttaggtgattatttgcgcccaataggagatgagatggactatgttgctttcttatctgttacggttggggaaggagttcgggacattgctgaagagtggaaggcgaaaggtgattacttacgtagtcatgccattcaatcgttagcgcttgaattagcggaaggacttgctgaaaaaacacatatgctcattcgtgaccgctggggcattccggactcacctgaactgacgatggaagaacgtttccgtacgaaatatagaggaatacgagtgtcatttggttatccggcgtgtccagaacttgcagatcaagaaaagctatttcgcttaattcatccagaggaaataggtatttcattaacagaaggattcatgatggagccagaagcgtccgtaacggctatggtattttctcaccctgaggcaagatattttagtgtattatagtctagaagggggagacgtatgaagaaaatagtctttacaggtggcggttcggcaggacatgtaacacctaatttagccattatcccatatttacaggaagacaactgggatatctcttatattggttctcatcaaggtattgagaaaacgattatagaaaaggaaggcattccctactatagtatttcgagtggaaagctacgtcgttattttgatttgaaaaatataaaagatccttttcttgtaatgaagggtgttatggatgcgtatgtaaggattcgaaaactaaaaccagatgtaattttttcaaaaggcggtttcgtatctgtaccagtcgtaattggaggatggctaaatagagtaccagttttattacatgaatctgatatgacaccaggactagcaaataaaattgcgcttcgttttgcttcgaaaatatttgttacatttgaagaagcagcgaaacatttaccgaaagaaaaagtaatatatacgggatctcctgtacgtgaagaagtgctgaagggaaatcgtgaaaaaggtttagcgtttttaggtttttcacgtaaaaagccagttattacgattatgggaggcagcttgggcgcgaaaaaaattaatgatacggctcgagaagcattaccagaacttcttaaaaaatatcaaattgttcacctttgcggaaaaggtaaccttgatgaaagtttacaaaataaagaaggatatagacaatttgaatatgtacatggagaactgccagatatattagcggtaacagattttgttatttcacgcgcgggctccaacgcaatttttgaatttttaacattacaaaagccgatggttttaattccattatcgaaatttgcaagccgtggagatcaaatattaaatgcagagtcctttgaaaggcaagggtatgcctccgtattatatgaagaagatgtaactgtaaaatctcttataaagtatgtcgaagaattgaatcaaaataatgagaagtataaaacagcactaaaaaaatataatggaaaagaagcaattaaaacaatcattcaaaatatttcagaggcatgatgaaacaatcatgcctcttttagtagggtgaaagattccaagaattgatatttttatgttacaataaagtgaaactttaatcagttgggttcatcccacatctaacttctttactgttactaaattttgaggaggtagtcttactgccctcaaatagcgggataacaaatgggttaatagggaaattccaattaatgaggcgtgaaaatacgaatggattaggagtgactgtgttggagctaagtctctatgaaaatactgcacttattatatgctttgtgttgtacgttggtagtgttattgtttatatttcaaggaaattttcgcaagaaagagagcttgaaaagtcagagataacagctgaactagaaatgttagctgatgaaagttataaaaaacaaaaaataaaagaagaccatgaagcatcccatcatttaaacgcaaataagttttaaagatggggattttttttgaaattgttctttattatagctataacaaataacgctaaaaaggagtttccccatacacaatgaaggagtgtatataaatgaatttttatatcgcctcaggtttccaaaataaacatcttgtacattccgtagcaaatgaactgaaacatgcaggatggcaccatacatatgattggaccaaaaatgaaagagcagcgaatgaagaacaattaagagaaattggtcaggcagaacgaaatgctgtaaaagaagcggatgtatttttacttatattagatggcggaaacgggagccatacagagtttggaatggcgattgcactagagaaaacgatatatgtatatcatgcaggaaacccgctccaaacaacgttctatcacttgccagaaataaatatttttgaaggagatgtagctgagtttgcatcttttgttatgaatcatgtgaaataatagtaactacctaaaaggttataaaagtgatcttttgggtacagtgatgataagaaacgtatataaaggagtacataatatgaaattagaaaatggatgggaaacgagctttttagaagtcgtacaaaatagtgaatttaagaaagaggcacttcttagtcaattgctttgtcaggatagtgaagaagtagaagagcttgtggatgattacggctacgaagaacttgttgaacgtgaacatgatgatgagttagctgaaatcttaggagaagaactttttagtgagatagaacgccaagtattcttatcttcaaacccagaagaaaaacttatttcattcgtcaatggattaggttttcatgtgctagattggatcgttcttcttgaaacagaatttggcattgatagtgcaaactttacatcagatgctgtgaaggtgttagaaaagcgtttcagacagtttccatacatagaggacaagacaatttttgatatgacatttggagaatcgatggatgtattagaatctgttacaggattacaactaaaggaaaagatgaacgtataatgaaaaaagaacgtgattggatcacgttctttttttacataataataattttatcatctagttttgtctgcccggtaagaagtgcgtttaaatattccacttttcttatacaagcttgtatatgtctttcaatctcttgtaactctgcttggtgatgcgtttcaattggatgaatttgtacgttgaatttttcaaattgactactatatgttatttctgcatagccgctcataatatcggtttcgttatgaaataaaaattgcttcgttttgtcacagaatgatacatcctgaaagccatatacttttaatgcttcaattacttttttaatcatttttgtattcattttttaaccctctttacgaagttctacttatatattataacataaaaaattacatagaaagcgcttccaagtgtgttttattataaactttacgtttcaatcacaaaaatgaaacaaagaaaaaataattgtaaagaaggaaggactcttttattgtttcgtcatatatatagagaaatagtgcaatgaaaggaaattttccgaggtggagatcgtatttccaatttgagcgcagtaaaagaggtgagaattttgaactttgatattgtaggacaaaaagcatatataaaagatggaccgcatcggaaccgaattggaattgtaaagaaaaacgagacaaaattagcatcgcagtttgctattgtaattggagaacaaatcattgatgtagagctaaaggatatcgtgttagttggagtagacgtaggacaatttcataaatggtgcgaacaaaatggttatttgtgaaaaggacgggctgtgagataatgaaatatatttgaggaaagaggatatgttatcatattctctttttctatgtttcaggaggcgaaaatgaaatataaagaacaggagtttacgttggagttaaaagagaacattcaatgtatggagaaggaaatagagcgaatattacttaaactgcataaagagtatgcgcatttatacatagaaaaacacatggaattagatatgggatttgcaagagaaaaagagaatccctttgaggtgggctattattcatcagttgccatagctatattagatgaagaaaaagagatgattgaatttcactatattccaatttggaaatgcgaaagaatctttttaggaatgtcaattcaatcaaacatttttgggagtaagaaagtaggggaacttgttgatgaatcttgttatgagattgaggaggagttaaaagagcaactagaagaatacttggagtaagaattctcaagataaaatctataaagagggaacggaataaaaaagacgctaacaattgtatgttagcgtctttttttcattatgaagcaatttcaccagtttttgtatcatcttgattgtacgtatcttgatctaattcaccaagccatttacttgaaataagacctgctgtcatagaaccacttacgttaagagctgtacgccccatatcgattaatggctcaaccgagataactagagcaacaataccgattggtaagttcattgtagatagtacgattaaagctgcgaatgttgcgccgccaccaactccggcaacaccgaatgagctaatagcgataacagcgattaaagttaaaataaattgtggttgtaatggatcaattcctacagttggagcgaccatcattgcaagcattgctggataaatacctgcgcaaccgttttgtccgatagataccccaaatgaagctgcgaagtttgcaattccttcggaaataccaagcttttctttttgagcttcaatatttaatggcatcgcaccagcactagagcgagatgtgaatgcaaaagttagtacagggaacacttttttcaaatattgaattggatttaaaccagacaatgcaattaataataagtgaatgataaacattacgataagtgctacgtaagaggctaacacgaagttaccaagttttaaaatagcatttatatcgctaccagcaactgtttttgccataagagctaatacgccgtatggagtaaggcgtaaaattaatgttaccatacgcattacgattgcatatacagcatcaagcattttcttaaatagttctgcttgttctggatattttcgttttacacctataaaggcaatgccgataaaggctgcaaatattacgacagaaattgttgatgttggacgagcgcctgttaaatcaagaaacggatttgtaggcaatagctctaataatttatctggaattgttgtcttttcaatagaagtaaatctttcttcaactagtttcagacgagcagattctgcatcaccttgttgcaagcctgctgcagatacatcaaatcctgcacttgcagcgataccgacagctgcagcgattcctgtagtaagaattaaaattccgataataagaccactgattttaccaaggtttttcgttaactgtaattttgtaaaggctgaaataatagatactaaaataagtggcataacgatcatttgaagtaatttcacataaccgttaccgattaagccaaaccaagtatttgattcaataattattttagaagttggttcataaataaattgtaatataagaccgaatataattccgactcctaaagcagtaaatacacgtttattaaaagatacatgcttacgttgcatataatataatacgccaactaaaatgagcatgactgcaacgttaattccgacaagcagtgtattcatgttgattccccctaattccaatctgttatatagaatataaggcaataaaacccataagtcaactaggaaattccggaattaaaaaaagatggcaaaatgccatcttttaatgtccagccccagggacaagtaaaaacgtcgtgtagtatgtaaatcctatgaagaaaacagttaaatatgccccaaatacgtatatatacatacgctctgttaattttaaatagcttaaaagtacgaagaaacctgtttgtcctaaaaatagtagtgcggtctgttgcatatcccctacgtaaaacataaccgagaaaattccagtccaaaagccgagaacgcgaaacatgcgctccatgccatctccctccttttctaaaaaaagtaaacctcacctcattatagtttatttttcttactattgtaaatattcattcacataaaaagaagccaattattattggcttctttttatgtgagaaattaaattgttagtttataattacaagatttacatccatctaatagactatcatttcgagttaattccatgttagggaataggatttcaaaaattcctttcatcatatctccgtgcatgttacaaatttcagttggatgatgaacagcaacttctttaaatggacaattgtgtacatcatagaaaatttttgttccatctgcacttaattcaaatgcaggtgataagccagctgttgagaaagcttcttttgcaatttgaactttttgttccactgttaaagcatcttcactcacatttaaacgttgcatatgttgttgcattaattcagctccgaattgttttcctgtttcgtatagcgctttctcaccagcagcgccaaggctaagtaaagaattaaatgcgattcttgctaacaattgataatcacggaatggaaattgtaattggataacatcttcagataagacatataatctgctcggtcttccgccttttccagttttcttcgtttccgattttagcatatgaacatcttctaatttagataaatgtaaacgcgctacgtttggatgaatatcgaattcatctgcaatttcttgtaccgttacgtaactatgtttttgcgaaatatatttataaatgtaataacgagttgggtcagataatacacctgtaatttttaaagcttgttccatgaggatctccacctttatcactttatccaagataataacattataatacagataaacattattataggtaatttcagacaataattcggaaattgttcataatttcacaaacatatttttccttttccctctattgaaaatacaaaagtccaaatttttattgcgcatgttttcatgctatatacatagtgaggagggaaaagtgatgaatgggattgaaatttttgcgaatacaattttaaaagaagcgtgtagggtacaagcgtcagatttacatattgtgccccggcagaaggatgtagcagtgcaactacgtataggaaaagatttaatgacgagacagtgtattgaaaaggagtttggagaaaaactcgtctcacatttcaaatttttagcatctatggacataggagagaaacggaagccacagaatggttcgttgtatttgcaaattgatggacaagaagtgtatttacgcctttcaacacttccaacagtatatcaagaaagtctcgttattcgccttcatttacaagcatctgttcagcccttatcacatctttcgttatttccaagtacggcagcaaaactactctcgtttttacgctattcacaggggttactcgtgtttactggaccgactggatctgggaagacgacgacaatgtatgcattattagaagtaattagaaaaaagaaaacacgtcgcatcattacacttgaagatccggttgaaaaaagaagtgacgatgtattacaaattcaaataaatgaaaaagcgggtctcacatatgaaacaggattaaaggctattttacgtcatgatccagatattattttagtcggtgaaatccgggatgaggaaacagcaaaaatagctataagagcaagtttgacaggacatttagtaatgacaacgctgcatacgaatgatgcgaaaggagcaatcattcgtttcatggattatggtataacgaggcaagagattgaacagtctttattggctgtagctgcacagcgacttgtcgaattgaagtgtccgttttgcagaggaaagtgctcaactttatgtaaatcaatgaggcaagtaaggcaagcaagcatttatgagctactatatggacatgagttaaaacaagcacttaaagaagcagatggagaatgtgttacttacaaacatgagactttagaatcgtcaatacgaaaaggatatgctttaggttttttagaagaagatgtttatgtttaagaaaacttggagtttaagtgatcaagtagtattgttgaaacgtttaggagaattattagaaaaaggctactctcttttacaagcattagaatttttacagtttcaattacctgtagaaaagaaagtacaattgcagcgcatgattgaggggttaaaagatgggaaaagtctacacgattcttttcatcagttaaagtttcatcaggacatgttaagttatctattttatgccgagcaacatggtgatatttcttttgctttgcaacaaggaagtgtacttctttataagaaagataagtataggagagacatgatgaaaataatgcagtatcctatgttcttgatgttttttctactaatcatgctttttatttttaacctcattttattacctcaggttgaaatggtttatagttcgttcggttctaatacaccactacttacagaacaaattttaagtgcaataaaactgctaccatacattattttaaccgctattttaactgttattattggatgtagtttatacatgttgtattttaggaaacttccacatattagacaggtaaaaatcatgcttcgtattcctctcatcaaaacatttcttattttaaagcattcacattattttgctactcagttgagtggtttattaaatggtggactatcagtatgcgaagctttaacaataatgatggagcaaagatatcatccgttctttcaatatgaagcgaatcggattgaaagacaattaattggaggagaacagttacaatctatcattgctaaaagtgggtattacgagaaagaactttcttatgttattacgcatggacaagcaaatggcaatttagggattgaattaggtgactatagcgatcttattatggaaaagatagaacgaaaaattaaacatatgttagttatcattcagcctattttatttacatgtattggaggaatcgttgtccttatgtatttagcgatgattatgccgatgtttcaaatgatgaattctatttagggggcatttgtatgcagaatgaggaaggatttactctgttagagatgctattagtaatggttgtcataactatattattactattaattattccaaatgtagttacacagcgttcatcggtccaaggaaaagggtgtgcagcttacgtgaaatctatagaagcgcaaatacaagtatatcaattacaacataataaaattccatcgttaaaagaactggcagatgaaaagtatattacaactgataagtgtccgaatggcgaatctattcatatatcagatgatggcacagtatcaattagggcattgtgaaacaacaagggtttacttttttagaaatgttactcgttttatttgttatttctgtattaagtatagttacgtattttagtgttcattccttatacgagcgacaaaaagttgaacaatttttgagacagttttcaaatgatattttgtatatgcagcaattagcgataaaccatcaaaagcactacacattacgttggcataaagatagaaatatgtatgctataaaagagtcaggtacaaagtattatatcgtcaagcgagagtatgaagaagatatacaaattgatttgcatacgtttccaaatccgatgacatataacccaagtggaaatattaatagaggtggtacgattataatttcgtatagaaattataaatatgaaattgtatttcagcttggaagagggagatttacgtatcgtgaaatgtcaaaaaggatccataatggctgaaatgattgtatcgttaagtgttttaatgatggctgtatcgttactactaccgcaaacagtattagttatgcaagaaagaaaaaatatacaaattcgttataaggcaactggattattaaaaaaagaagcagctatatatatgtatggaaatgaagaaaagcgaataatagaaaagaatataaatggaattgtgtattacacatattggggaggcaatgaagtttgtaccatgtggaaagatgtgaaagacagaatgatggaacaatgcttttatgtaggagaaaaaataaattagaatttggtttttcattaatagaaatgattgtatgtctgtttctattatcaatattttttttgctctttccccgcctacatttcattgaaatggaaaataaacagtcgaaagggttaaatgattgggagtgggatgtgtatttagggcaaatgcaattggagtttcgtgaagtatcatctggagaacagctagcatttgaaaatggagaaagtattttacaattccgatcgcgtaatgggagtgaagtatcgtatgaaaaagagaatagtcgtcttataagaaaggtaaataggcgcgggagggaagtcgttttacaaaatattggaacggtttcttacaaactaacacctcatgtactcattataaatgtgaaagatactagtgggaaaatatatgaaggtgtagttatgcgatatagcgaaataggaataaacgtatgagaaagcaaaagggatttacaatgcctggaacgattatctttcttattttattaacttctttttttatatacgaaacaaatatgttgtttacagataaaaatttttatataggaatagaacaaaaatttttattggatgaattacttaaccgatctattacagatataaaaaaagacttacagcaaaaagaaaaagaaggtacatttttctttcagtatgaaaagggagaagcgagtggaaattatgtctttgaaaatgatttaattctcgttgctttgcagtgtacactcaaacaggaagctttctatacggtgagttttcggtatagaaaaaaggatgggaaaatagtcgattggatagaaggataatatgtaaaatatatatatagataaaccaggatttcctattgtaaattgaattgattttttagaagaaatggataaatataatgattaaaagtttaaattttctcaaaaaagagaaaggtagaaagaatatgatatattcatgctatccaatcattatttttagggagaatagggaaatgacaaacaacaatcaaataggtgaaaataaggaacaaactatttttgatcataaaggaaatacgattatgacagaagatagagaaatacacattatttcaaaattcgaagaacctcttattgtcgtattagcaaatgtactaagtgatgaagagtgtgatgaattaattgaaatgtctaaaaataaaatgaaacgttctaaagttggttcagcacgtgatgtaaatgatattcgaacaagtagcggtgcatttttggaagacaatgaacttacttcaaagattgaaaaacgaatttcatctatcatgaatgttcctgcgtcgcatggtgaaggattgcacattttaaattatgaagtggatcaacaatataaagcacactatgattattttgcggaacatagtagatcagctgctaacaatcgtattagtacgcttgtaatgtatttaaatgatgtagaagaaggcggagaaacgtacttcccaaaattaaatctttctgtacaccctagaaagggaatggcagtatactttgagtatttttatcaagatcaatcattaaacgagcttacgttacacggaggggcacctgtaacgaaaggcgagaaatggattgcaacgcagtgggtgagaagaggcacttataagtaaaagcgagtgttacgttttgttcttcatagtataagaacaaaacgtttttttattaaacaaagtagcatctttcgttataataacaattaataaatgacgattgagaggacaagaaatgaaatctatatacataaccggctacatgggagcagggaaaacaacaattggaaaagcgttaagtaaagaacttcaaatggatgttgtagatactgatcaaaaaatcgaagagaagcaagagaaggcaattcgaaaaatttttgccgaagaaggcgaaatggcttttcgggaatatgaaagcgaaatgttacgtgcgctaccagtccataatgttattattacaactggtgggggaattattgaacgagcggaaaatcgcaagtggatgaaagagaacggaactgtcgtgtatttatattgtgatccgcatgtaattgcagaaaggcttcgtgaagatacgacacgtccactatttcaaaagaaagatatagatgcattcgtaaagaaatttgaatcacgccgagcttattatgaagaggctcatattcatatcgatacgacaaataagtctgtaaagcaaattatgaatgaattaaaggaaaagattaatgtataaaaaagtggacatactaatcaagtagaggtgatgataatatgtctactaatgattatgttcgctttgtgacgcagcagtttgtgtcgtatatggatgctccaaaagaagatcgaaaacaaaagaaagaacaacgccgtgctgaaaaagagccatttatgaataagtggtttggtgttatgccgctgagtgctgctttgttttaccgaaatgtaaaaagtaaaagaaaaaaatcaagttaaattttagtcatatgtttaacaaaccaaaaatcccctagtgtcgtattacactaggggatttttatttactgcacggattcttgttcttccgtaacggcatgtattttattatttacccaaacaaatccaattccgatacaaatggaaatgccccatccaacagcggtcataatcgctctcatttcaccatagccatctacaccgaaaacagagatgaaataaatttttaagaagctttttaatatgaattgtagaccgaaaaatagcgttaaatattgtagtgctggataaatacgactatcacgataaagctcacgacttttatcacggtcatggccttgcagtgcggcaatatccgcagcgaaatataacataagtggtttctttataaaaattgtacatatgacgataataccgagtacgatgtgataatatgcatcattccacaacattcgttcagctgacccagataataaatctaccgttgtattagaaatgagtgtaattaaaataaagaaccctgtcacgttaaactgtttttcttttttaaaggtatacagtgtataaataatccccggaacagaggaaagtaacatcgcgtaataaggatcgatataaggttttgcaaatttccaaatgaggaatgggattacgagataaaagacaagatctaatatagcttttttattttgattcatacaaagcctccttaagtcatacatatattttataatataatttctgaaaattgtataaggtttaatgggaaaagaaaaaatatatcaattttcgaggggagagtagattgaaaaaaattgcccctagcgtagtaagtttttttagtatataataaaggaaacgctttcatttttaatttgttcacaaaatggacggaaaatcacatatttactatcgatatgttgctttataatgaaactaattaaatatacatgcatacaatattgtgaaataaataacataaataatctatataaatgtaaacgttatcaaaatagagaggtggagacaatgagtaaatttttcttcaatcataatccagcaacagtagaggatggaaggcttgttaaatatgctgaaattatttatggagaaggtggccgttctgtattagaaaatttaatggtgaaggcatctatcagattgcgtgatcgttatccgaataaatctgacgagcagatctcgaacctagtaaataaaggcatccatgatatgtttcaaaaatatgtgagcgagtaagagtggccaatggctgctcttatttttttgtataaggattgtaactctagctgaaaataaacatgtattctgaaaaacgtaaaaaggagtgggaaagatgagcaatggaattggacgttcgaaagaaaatcttccaactgatgcaaatcatgtgagcgcgaaggatcgtgcgtatcaaaaacgcatggcaaagcaaaaacaacaagagcgtaatgaggatagagaataactcgaaataaagctccttctaaagcagaaggagctttatttcgatagaaaatgattcgcggtaacataaaagagtccaccgttaataatttgcactgtaatacgtggttcatactgttcttgcagagcttgtttttcaatttcatagctctcaggaagttcgtcactttcttcataaaaacggtttaaaaggtctaaatcatgattccaacgcactcttgcttcttttgcccacgtatggtcatcttctgcaattatattttttaaagcgtcttctatgcgttgtaaaccactttgaggtttaatgatgggcgagagcgtaaaacaaaaatcaggtatttttggtgtaagtttaatgtttgttaatgtttcatgaaagtttgccatcattgttccagaaatgagatgaataccaatcgagtgaaggatgtctttttttcgatcacattgataggaaacttttatattaataccgagccaagggtggagcggtgtatgtgttgacccattatgtcttacatcctcatataaacgtatgtatgagcctaattcttttgtcgtttggaaaatttgatgtagacgtggtgaaccgtagtgaataagctcaccatcattttcttcattttctggatttgtaataagagtaaggcgcatcggattcggtacgcctcctgttttctcaagatagtgccaataaaaagggcgattcattaataatttatccatctcaattgttaactgtacatctaataaatgaggagaacgttctaaaatttcacagttattcgcctcaaagaaattgtataagtaattatgaatttcatgttgctgcatagccttgcacctcagcttcatttcgtttcgcaaagtcgataatagatgttaagttttccatcttaattctaatttcaccttcgctctttgattgcgcgaaaatttcttgaatgtgcgcgtcgatgtttttcatattaattctcgttaaaatttcatcgagttcaccaataacacgctcgaataagttgattttttcatataacagtttcagaatatgttcttcaacagtatgctttgtagctaagttataaatatgaacatcatttttttgaccgagacggtgaatacgtccgattctttgctcaagacgcattggattccatggcaaatcataattgatcatatggctacaaaactgtaagttaatcccttcaccaccagcttcagttgcaattaatacttgtgcgtggttttggaaaagctccttcatccaatctttcttcccgcgtttaaacccgccgcggaatggaacggaagaaataccgtgttgttgtaaaaaccattgtaagtacatttgtgacgctcgatattctgtgaagataacgactttatcgtcaatttcttttataagctcaagagctttatttgcttttgagttgaaaggaatatgattaattttgtccattagcacatcgatatgtggatcttttatataatgttcgttttctttctgttttttttctacatgctttttcaatgaatagtaaacagcctcacgactactacacgcttcccgttttaaagttaacgatgagaaagcagatgtgaaggcgtcttgtcctcgccaattttcgatatcattatatagagcttgttcttgttcattaaactcaacaaaaattgtacgtacatgtctcttcggccaatcgataccggtattatgtcgtctatttcgcaccattactttattaatgagagcttttaagtcttcatctgattcggctgagcgatttttggaagcgtaatattcttcaaagttggattgattgcctaaatgtcctggttttaataaagaaacaaggttaaaaatttcatcaatcttattttgaacaggagtagcggttagtaataaacaaaacttcttttttaatcgttgtgcaaattcatagttttttgttttattatttttcagtttatgtgcttcatcgataataataaggtcatattccaagttcaacacgatatcgcgatgtggtgaacgtttcgcagtatcaattgatgatacgattacgtcagcttgttcccatgagtagcttttcttttgtgctacagcgggaatgaaaaactttgtattcagttcgtatgcccattgtgatacgagagaagctgggacaagtataagtacctttttcacaagcccgcggaccatgtattctttcaaaataagtccagcttcgattgtttttccaaggcctacttcatctgctagaatcgctttaccgttcatttgttcaatcacattttgagcgacttctaattgatgcggaagcggtgtgaaatgggataaatgtttcggtgcttgtagtccatcaaaagtaggaacaagtaacgatttttctgtttcataagctaagtgatataaatcccagtttgtccaaggaccatcttcgtcaattctatttaaaaaattgttttgccatgtccgatctacggaaatatcgacattcattacaactctcccaccttttataaactaaagtaattattttttaatgtatgatgatttgccttaaaagaaggcataattatcgttattaaaggctatatgatagacaataataaagtattaaatctcaaaagctgtatttattgtgttttaacataaaaaattctaaattattttttatgctagaatattgatgaaatatagcgaatgatgttaggataatggtgtgaaatgtgtggaatctttcgtattttatccaagaaagtgattttttatttacgctttcataaaaaaatataatgagattccgtatatcctatcttttcagaatgaaaatgtttagaaaagggaagcaacttttattgatttgtcaaagcataagggggagagagcatgattacattacaacgtacaccgttatttgatgtatacgcgaagtatggtggaaaaacaatcgacttcggtggttgggaattaccagttcaattttcaagcattaaagaagaacacgaagctgtacgtacagctgcaggtttgttcgatgtgtctcatatgggagaagttgaagtaaaaggtgtagatagtttagcatttttacaacgtgttgttacaaatgacgtatctaccttaaaggtagggggcgcacaatatacagctatgtgctacgaaaatggtggtacagtagatgatttattaatctacaaacgtggtgaagaagactatttattagtaatcaatgcatcaaatatcgagaaagattacgaatggttagcaagtcatgtaattggcgatgcgacagtagtcaatgtttctagtgaagttgcacagcttgcaattcaaggaccaaaagcagaaggcattttacaaaaagttgtgtcagaagatttgaaagaaattaagttctttaaatttaaaaacgatattcttgtagatggaattccagcacttgtatctcgtacaggttacacaggtgaagatggattcgaaatttactgtaagagtgaagatgctgcaaaactttgggagaaacttcttgaagttggagcagaagagggcttaaaagcatgtggtttaggtgctcgtgatacacttcgattcgaagcaacattaccactttatggacaagaattatcaaaagatattacaccgattgaggctggaattggctttgcggtaaaaacaaataaagaagcagacttctttggaaaagcaacgttaaaagagcaaaaagaaaacggtgcgcctcgtaaattagtcggcatcgaagtaatcgaacgtggaattcctcgtacgcattaccctgtatttattggtgaagaaaaaattggggaagtaacgagtggtacacaatctccaacgttaaagaaaagcattggtttagcactaattgatgtaaaatacgcagcagttgatacagaagtagaaattgaaattcgtaataaacgcgtcaaagcagtagttgttccaacaccattttacaaacgttcaaagtaacggggagaggggtagatttcatgttgcatcgttatcttccaatgacagaagaagacaaaaaagaaatgttacaaacgatcggcgttcaaacgatcgatgaattattctctgatattccagagagtgttcgttttaaaggggatttaaaaattaaagaagcaaaatcagagccagagcttttaaaagagctatctcaaatggctagtaaaaatgctaacttaaaagaatacgcttctttcttaggagcaggcgtatacgatcattatgctccagtaattgtagatcatgttatttctcgctcagaattttatacagcttacacaccataccaaccggaaatttcacaaggggaattacaagcaatctttgaattccaaacaatgatttgtgaattaacaggaatggatgtagcaaactcttctatgtatgacggggggacagctttagctgaagcggcaatgttagcagctggccatactcgcaaaaagaaaattcttgtatctagcgcggttcatccagaatcaagagcagtacttgaaacgtatgcaaaaggtcaaaatcttgaagttgttgaaattaatcataaagatggtgtaacagatttagacgtattacaaagtgaagtagatgatacagttgcttgtgtaatcgttcaatatccaaacttcttcggacaagttgaaaaattagctgatattgaaaaaatcgttcatcaacaaaaatcattatttatcgtttcttcaaatccattatcattaggcgcattaacaccaccagggaaatttggtgctgatattgtaatcggtgatgcacaaccattcggtattccaacgcagtttggtggaccgcactgtggttactttgcaacaacgaaagcatttatgcgtaaaattccaggacgtcttgttggacaaactgtagattcagatggtaaacgtggatttgtattaacgttacaagcacgtgaacagcatattcgtcgtgataaagcgacatctaacatttgttcaaaccaagcgttaaatgcactagcagcttctgttgcaatgacggcacttggcaaacaaggtgtgaaagaaatggcacgtcaaaacatttctaaagcacaatatgcaaaacgtcaatttgaagcgaaaggcttcacagtaacatttgctggaccattcttcaatgagtttgttgtagattgcaaacgtccagtgaaagaagtaaacgatgcattattacaaaagaatattatcggtggttacgatctaggccgtgattataaagagcatgaaaaccatatgcttgtagcagtaactgagcttcgtacaaaagaggaaattgacacacttgtaaacgaaatgggggctatccaatgaagaaccaagaccaagcacttatctttgaagtgagtaaagaaggacgcataggatatagcttacccaaattagatgtagaagaagtgaaactagaagatgtgtttgagagcgattatattcgagtagaagatgcagagctaccagaagtatctgaacttgatattatgcgccactatacagcactttcaaaccgtaaccacggtgtggattctggattctatccacttggatcttgtacgatgaaatataatccgaaaattaatgagagtgtagctcgtttcgcaggatttgcaaatattcatccgttgcaagatgaaaagacagtacaaggtgcaatggaattaatgtacgacttacaagagcatttaattgaaattacaggtatggatactgttactttacaaccagcagctggtgcacacggagaatggacaggtttaatgttaattcgtgcataccatgaagcgaatggtgactttaaccgtacgaaagtaattgtgcctgactctgctcacggaacgaacccagcatctgcaactgtagctggttttgaaacaattacagtaaaatcaaatgaaaatggccttgttgacttagaagacttaaaacgtgttgtaaacgaagaaacagcagcacttatgttaacaaatcctaatacattaggtctattcgaagaaaatattttagaaatggcagaaatcgtccataatgcaggcggtaaattatactatgatggtgcaaacttaaatgcggtattaagccaagcacgcccaggagatatgggatttgacgttgtgcatttaaaccttcataaaacatttacaggtcctcacggcggtggtggcccaggttctggtccagtaggtgtgaaagctgatttaattccgtacttaccaaaaccgattttagagaaaaccgaaaatggttatcacttcaactacgaccgtccagaagcaattggtcgtgtgaaaccattctatggtaacttcggaattaacgttcgtgcatacacgtatattcgctctatgggtccagatggattgcgtgcagtaactgagtatgctgtattaaatgcgaactatatgatgagaagattagcgccattctacgatcttccattcgatagacattgtaaacatgaatttgtattatcaggtcgtcgtcaaaagaaacttggtgtacgtacattagatattgcaaaacgtctgcttgatttcggttatcatccaccaacaatttacttcccattaaatgtggaagaatgtattatgattgagccgacagaaacagaatcaaaagaaacattagatggtttcattgataagatgattcaaatcgctaaagaagtagaagaaaatccagaagttgtacaagaagcaccgcatacgacagtcattaaacgtttagacgaaacgatggctgcacgtaaaccagttttacgttatgcgaagccagctcctgtacaagtttgattaaaataacaaaagaagaactcgctgaggcgggttctttttttgtatggataatttgtcccgcattaacggacagtaaactctcaacttaaaacttagctgctgcaaagaagacaggtgggagataaactgtccgtaaatgcccgattggttcaactaataatcagtggggatgaacaaaaatccccactgattaaagtttcactttatgcagaaatagtgaagaaaatgttaaaaaaatatgttttttgtttcctaatggtgtaaaggtgtagttttataggtagttttgttgaaaaagtcggtttgataaaagtatttatttttgttagaattttattgaaattaagaagatgtgatgaggcaaagattactcatttttatgtatatgtgaaaaaacgaacaagacgggggtgaaagtgtgggatatcgatgttatagaatggtataccatttagaaaatggagaaacaattaaagatgtaaaagaattttgctatcgagaccaaggaaaagtgttagaaagagtagcaaatcgtgtaatggataatagagaagtgacggcgattgataaacaaggaacaatcatttcaatagcatgtgaggacattgtaaaggtggaacttgattacataacagaaagttaaccttgagtcatatcgaattattcgataaaataaactgttgaatggtgaagtgagaagagaggagtttatcatgggtagtacaagacacttttatatgtttatcttagcgtttgttcttgttgtggcattaacgatttacttaatcgttgacagcagctggtacaacacagttcatccggcattccttctgtttatgtatataggaattgcagtagtaagtttcggaatgagagacgagatgttagatcgctttgaaaagtgatacatatacgaaagaccaacaggaaaatgttggtctttttttcttgccaaaaataggatggtgtgtatatactgtatatataaggtatacacagtatatacacaaactggaggaaaacatgaatattattatttcgaattcttcccaagaccctatttatgtgcaaataagaaaacaattaagccagcttattttaaatggcggtttaaagggtggagatcaattaccgtctattcgtagcttagcgaaggaattacaaattagtgtcattacaacgaagcgtgcatacgaggagcttgaaaaagaaggatatatagaaactgttgctgggaaggggacttatgtttcacgtaaaaataatgaactattaaaagaacaaaggcttcgcctattggaaagtaaagcggaagagattgtgaatgaaagtaaagcgttgcagctttcacttgaagaattacagcagatgattgcgtttttatataagggggaatgagagagatgttagagttaaaaaacgtttgtaaaagttatgaaggtttcgcagtgaaaaatataagttttacgttaccacgcggatatattatggggtttgtcggaccgaatggggccgggaaaagtacgacgatcaaaatgattatgaatttaattaaaaaagataacggagatataaaaatttttggcaaggacaataagaaagctgaaaaggaaataaaacaaaatatcggctttgtatatgatgaaaatcattattacgaagatttaacgtgtgaacaaatgaagcgtattattgcaccgttatataaaaagtgggacgaagagcagtatcaatcgtatatgcatagattacaagttccaaagtataaaaaaattaaagaattatcaaaaggaatgaaaatgaaatttgcgattgcaatcgcactttcgcaccacgcagagtttattattatggacgaaccgacagcagggttagatccagttgttcgaagtgaattacttgatatgttgcaagaaattgtaatggaagatgaagtatccgtattattctcaacgcacattacaacagatttagagcgcattgcagattatgttacgttcatcaatgatggagaaattatatttactggtgaaaaagaagacttaatggagaactacgtaatcgtaaaaggaagtaatgatttattagaccgagaaggaaaagaactatttgttggattacgaaaaaataagtttggttttgaaggtttagcgaaggataaacaaggaattatcgattggtttggaaatgaggttgtactagaaaaggctacattagatgacattatcgtttacactgcgaaagggagaggtgtctatgcgtcagctaatctataaagatttgttcttttttcgggttatgtggttagtgtattttattatgcctcttgttttctttggattagatccagatggtgaattgttatttccaatgagttgcttactcataacgatatcatcttctatgatactaatagcgatggatgaaaaaaataaaagtgatgttattataaatagtttacctgttggacgaaaggatatcattattgctagatatatttcgggtgtaatatttattgtaggtggcatgatttctactacgctagttgtttttcttataagaggtatcgctgtcattggtgatattggagcttatcatcccaatttgtatattgaaattccttggtatgtagtagtcagaggtgctgtatattctttagtttatattacagcattattcccgagttattatgggacaaaatcaaaagtagtacgtggaatatttacaggtggagccgctggaataggtgttattgttggaatgtttattggtgacggagaaagtgctacggcatcattcattgattggattatgaatccattacattttggcatatttatagttggattaatcacactagctagtgtctatatcgtttctatgcttcttacaattaaaatttatgaaacgcgtgatttatagagaggagaattcatatgcaacagttgattttgaaggagttttttttacagaagaagatgtttcctttctattttttaatccctattttatctatttttaagaattccgtcgaaccaatggggattgcaataggagtatttataacatgtagtacgattatatatatttctttttattatgacgagaaaagtaaagcagaaaaagtattagtgagtttgcctataacgagaaaagagataattatagctaaatatatttcaagcacattatttattatggctggtttgagtgtaacttttatagtcgtaatattaggaaatattttattgaacagagatatagttatgcctggatatgcaatattttcagcaatagtagcaactttgatttattgtgcagtaacgataccgactaattacattgggggatataaagttattactgtcttgaatttgattatgctttttcctttaatgggtatgattggtcttatgtgcaatatttttggtgataaaacaattatgttaaaagtacttcactctcaagaggctacacaagcaatgggtgttcttggtgtcggagtattagtgagtatattcgtatcattgttcctctcaatgaaaatgtttcaggaggcagagttatagaagggacattttcatattaggaggtgtaatacatgatcaagcaactaattttaaaagatttcatcattcaatggaaatttttaatttggtacatactgtatcctgttttcttttatatggccttaacagatacggaaaatttattcatcattatgtcagtaattattacaattggggcaacagtaaaaacatttgaagcagatagtaaaaatgagagtgaagttatagtaaatagtttaccaatattgagaaaacaaattgtgtatgcgaaatatatagtagcaattattattctttttataagtgtaacggtcagctgtttcacgatgggaatgaagaatgggattaacctatttgaatttattgaaacgacattgcttgctagtattagctttattttagtgtatttaagctttgttctaccaatatctttttggttaggatataaaaaaactattcttattacaatagtaatattcatggcgccgattgttattttagaaactttgtttcaaatcaacttggaacaaattcaattatataataccttgttattcattggttcaatatgtatgctcatagcatctatcttcgtttcagtgaaattgtatgagaagagagaattttaaaaggtgccctataaaaggcaccttcttcaataacgacaatacgagagcagtagtttataaaaagaaacgctatttggcacatctttcggagtatgtaatataaagctgaaaacgatgatgagaataagaaataggaaaaataaaaataggatttgcttatgtatagaattttgcatattatccactcctttttttgggtagtatgtccaaaagaaaggaatgtatgaaaaaaattggagggggaacaatggggaaacgaaaattgttatttgaaataggagtattatttttgtcaataggtcttttgttatcaaatttttattcagacataccatcaccgtttcctaatttgcataaaggaattggtataagtattgttataattggtctgttttgtcttatcacatctaacttctacagaaagtctgaatgaatataaaaaaggacagttactctttttcagaagtactgtcctttttaaataacttattccatagtttggcgatactccatataatgacgattgcaatggaggcgataatggaccaaacaatcgatataatttcaagtgtcatgttaggaaggaatgtgagaatggataatactttatgaaacaatgattctattatatgaaaacttatttgtaatagaatgacgatacaaagtgtgatccatgctaatattttctttccttgttctttccacatgacattcacctcacgttagcttaatagttttaagccaacagcgccgcataaaatgcagcttaagaaagcaagacgacgccaatccgctgattctcggaaaatgagaatgcctagaagtgcacttccagcagttccgattccagtccaaattgcgtaagcagttcccatcggtaatgtgttcatcgcaagagataagaagaagaagcttacgccgaagttagcgattaaaataacttttggtgcccagcctttcttttcagtggctactttcataaagagtacaccaataatttcacaaataccagctagaattaaaaatacccaagccattttatgcggcctccttcgcttctttttcttctgttactcgttttaaaccaattactccgaagaagattaaaccgattaataaaacttttacgatagagaaaggttctccgaagatgaaaatctctgtaagaacgattccaccagctccgattcctgtaaagactgcgtatacagtgccgacaggtaaatctttataagctctaaataataagacgaaactaattgtaattaatagagcaacaccagcccattcaagtggtgcctctgctttttttagtccaatcacccaaaagatttcaataataccagcgatgattacataaatccatgccatatgtcatttctccttcctaccagtcgttaggtaaagggcttaaaaacgacgcattgcaaagggcaatccgtcagtttgaaagtccgcgccaaaatactttccaagaagcgtctaaacgtgtctcaaaacgatttaaacctgcgtataatagttcaaccataagaccgtcgagtaagcatagaaaagcctctaaggcgtcttttacttcaatgttatgcagctcatcttgttcgcttgctcttttaaatacagggaataaaagttttccgacgttttcaatgtgtacatttgctttattaataatttgttcgcgaaatgcatcaggcggaaaataagaagttcgtaaccaaaacattgattcttcactttcaccaaatcgttttgcatacccttttaataattttaaaagcaattcttcagtggacgaattggaaaagctttcgatatcgcctgtgaagctctgcaaatctttttgaagagcagattctaagcatatgaaatatagctcttcttttcctttaaagtgtgcgtaaatcgatggttttttaatcccaacttcttgagcaatatttgccaatgaagttccttcatagccgtagcgtgcgaaatgagaaagtgctacagctttaatgcggtttgctgtcattttcatcccctacctaccgttcgttaggttaattatatgagatgaaaaatataatgtcaataggtgaagagttgaaaaagagcgttataggtaacgctctttttagacagtctctcgctcaattaaatggaatgaaagttcttttgcactgccgacaatttgctcgctttggatctgcttatggaataaagaaaaagcatgtgagcccattgcgagaccgggatgttcaattgtggaaatttctaatgcctttgaaatttcatgattatcaaatccaaggatagcaaggtcttcaggtactcgaataccatgttttcgagcctctgttaataaaccagctgcaacttgatcgttcgctgtgaaaatagcagttggacgatttttcatatttaaaatatgatggagtatttgtgctccgtcctgcattgtatagcattggtggaaaatccattcaggatgcaacgttttcccttcgttacgaagtgtatcggcgaacgctttttcgcgctccatggaatttacacttgtttttcttgctaaacaaattccgattttttcatggcctctacttagtaaataggcagtaccgagacggaaaccttcataatgatctacgtagatggatgaaatgaggggatgcttcattttttcacatgaaataataggggcaaattttgcaaaaggttcgatttgttcccaagagctcgttcgggagcaaataatcatcccatcaaattgtttcattttcatcatttcaagaacacgaatttcttcaatgctatcgtaattcgtttgacataaattaatgtgatatccggcagctaacgcttcgtttccgattccttcaataatcgtactgaagtaggggaggttaatgaaaggaagcataacgccaattgtatatgttttccctcttattaaatggacagcatttatattttttgcgtagtttaattcttcaacagcatctagaacacgcttacgcttttcttcttttacgtaagggtgattattcaggacacgagaaacagttgatatcgatacaccagcagttttagcaatttgttttatattggccatatgtatcacctctttcccttattataaagggaaaataataagaaagaaaaaatcttgacctgaaaagcttttcacaaactatggtattaataagacttctttttattcgcgtaaccttttcacttgggcgtaagaatgataggggtcttttttgtttgcaaaaagtgttgtcaaaatgtgtgagaataacgtggaaagttttcaaaggtggagtttggtgacaaagcgaatatgaagagaatatcaacgcttcgttcgttaagagagcggtatgaaagggcggaaacaaattgaaaaaaagaatcatttgtttcgtgttttctagtttcatgcttagttcgtgttcgtttcagcaaacgatgcaagaagaaaaacactttgtgggaacaacaggaggagctatggatcgtgttacggatcctattccgctaaaggaacttccaaaatattttccggtgaagtttaaagttccaacgtttttaccgtacgacattacaagtgatgtgaagggggaagtaagaacgcttgggaaaaagaacattgtcttaacgattaaatataaacagaaggagtcaggtagaaatgagtatattgagttaaatgtcgcgaactttccttatagttttccggatcttgtggaagagaagcgatttcaagaacaaatgaaactgaataatggaacgtctgcttattttaaaaataaagatgattatgaacgtggtgacgaatttgctacgcttatatggaaagagaaaggaattgaatatcaactgctgtatcggaatgtagaagagaacgatgaaaaggtaatcaagcagaatttattatacattgcgaataagatgaaatgaaaaaactagctgatttattcagctagttttttgtatgttattatttctttttaattttgcctgtccaagatttaaatccaccttgtaattggtagaaatctttgtagccttgtttttttaagtattgcgctgcacgacctgtacggaatccgctttggcaatataagtaaacaggttgatcttgacgaagttctttatggcgaaggcgaatttgtgataacggaatgttacgtgcacctaaaatatgccctgcgttatattcgtctgcttcacgaatatcgataagctgtgctttacggtaaccagcgcgaaattcttcttctgtaagagttttaattaattttttctgatagaagtacatccatacagtgtagccgataaatgctacgattacggctaataaaataatccaagttgttgacacgattctatcgctcccttttttcttatcctactttcaatattataatgcccttatgtatttatgcaacagattcatttgcatataagaagaaatttcgtattctttcacaaattttgtcgaatttggtagactagagaatgtgaaaaataattggttatatgaggtgcaggatgggaaaagaaaaatggtgttatattaactctggtcaatgttcaccggcatttaatatggcgttagatgaatgtttattaaattggcaaagtgaaaagaaaatgccaccaacaattcgtttttatgaatgggaagtaccaacattaacagttgggtattttcaacgtgttgaaaaagatattaatatggatgtagttaacgaaaagaaatatggattcgttcgtcgtcaaacaggcggcaggggtgtactacatgacaaagagttaacgtatagtgttattgtgtctgaagatcatccgaatatgccgaaaacagttacagaagcgtatcgtgttatttcgcaaggtttattagatggttttaaggcattagggttagaagcatattatgcagttccaaaaacagaagcagatcgtgaaaatttaaaaaatccacgttcaggcgtatgttttgatgcaccatcttggtatgaaattgtagtggaaggacgaaaaattgctggtagtgctcaaacacgtcaaaaaggtgttattttacagcatggatcgattccattagaaattgatttagatgaactatatgatctatttttattcccaaatgaacgtgttaaggaacgtatgaagagtatgttctcttctaaagcagtagcaattaatgaattaacagaccgtacatttacgatagaacagttaattaaagcgtttgaagttggctttgaaaaaggattggatgtagaacttgttccatatgaattaacagaagaacagttacatgaagttcaaacgttagcgaaagaaaagtatgaaagtaatgagtggaattataaaaaataagaggtggcgatagccacctcttatttttttatagtaaattaagtactttttctactttgattcctttatcttgtaaagaacgaaggcgacttacaacgtccataatttctttgtcaaatgtaacgctaataccttggctttgtagttcttcttttaagctttcaatagaatcatctatgtcgatgccaagctcgtaatcttgacaaacttcaattgtctttttcacgagtttaacataattttcttgtagttttgaatttgtttcagtcaaagcaggctgcttcggttttgcaggagcaaccggtgctgtctcttgctttgtaactggagtagggactgctttttttacaggcgctggagtaactagttctacagctgcttctacgcttactggcttcggtgtcggtaccggagtaggcttaggtgccatagcaggtgtttccacacgcgtaacaggcttaggagcaggcgtaattgcttttggagcttctacaactacttcttttttcggtgctgcttctacctgtgtttcttcttgctcggcagcttctttattttctttactccacataacgcgttcaatttctagagaaacattgtttttgttcatcgctgttaatgtaactttaccaacttcagcgtttccagtgaaatcaacaattttataaataacactcttgttccaatccacgtttccgctcaaaaataattcttcgttacatttcggcgttaagccctcgattttaatttctgcgtttacaccgttttcactatataccataattagcgaagcatttacatcttcgtctgctaacattagttcacgtaccattttgccggtgcgtacttgcgttttcttcttaactgacatctaatttctcctctcaaaaattcagtaataataaaaaaatcgtataacgaaaaataattgctcacgaagatttatgataccgataataaaagcatcacgtcaacaattaactttaattattttgcatttttcttattttctttatgaaatttttcaatttgtaaaattagacagaagaaaaaacagccttttgaagggctgttaaaatttagatgttttatataaaaatttgtacaaaatataaaaagaaagtgtaataagagcaccttgcaaaatagacaagttataaaataagtatggttttgttttgaaaaatacgtttgcaaaaactgataagacaaaaggtataaataccgataataagagaagtgctttttgtttccaggaaactaatattgtaaaagagaaacgtctaaataaagaaaaagttatgaaagcaccaattgttaaaacaatagcagataatattgttccgggaatactaaatggaattcctgaagtgtttgtatttgaaaatagtttttgcataagagtagtgaatgtatcgtatccaatttgaacagctaataataaactaactgcaaacccaataacggcagcttgttggaaagaattttgatgttccgaagagttaattaattcatcgcagtaagcttttaaatcctctccgaaaatatcatgcgcagttttaccgtcttcttgcgcttctaaaagatgatccaatatttctaaaagtaattcttccatttgtttttgtggaacgctagtaaggcgtaaataaataagcatatcaccataagcagcttcgttttcaggtgttaataactttctttttttattgtttaactgaaccatttctttttcagtcatgacctcgtcactcctttttaaagtccaagtattcttttttgaagaaaagtttatatagtacatagcaagagatggcaagcaaagtaccggtccaaggtgaaacttgtaatgtagtatagggattttttataaataaaaaggaaataccgattaatagcatccataggctatgacgtattaaaaagcttcctatatgcctccaaatagttgttttatttttaaataaatcagtgttaataaaatcgaagacaaaacgtatcataagatgtacggataatgtaaatacaagcagataaatgaaatcaatgtgtacaaatttaaaacgtgctttatctgcaaataagggtaatacaaatgcaattacggacgaaatagcaaagtatattgctagcaggtaacaagttataaataaaggaattgataattgttcccataaactttgcttcggtagggcggcaattaactcgtcacagtacgcctgtaagtcgtctccaaaaatatcataagcatttttttcttcttgctgggcttcaataaggtgatctagaatttcaattagcagttcttctgcgtggtattctggcactttagctaagcggatgtatattaacatgtcactataggcgatttcattttctgtagttaataatttacgcttttggttatttaattcgattaaatctttcgccttcatccccatcactctccttgtaataaattgtttacggtcgttgaaaccatcccccagctttgtttaaattcttcaagctgttctaatcctttatcggttacgtgataatattttcgcttcggaccgagtgaggaagcttttaatgtgccttcgatcaatttttctttttgcatacgtaataataacggatagatgcttccttcgcttacgaatgtaaagccatgtttatttaattttgtgctcagttcatatccgtacacttcttcttgtgaaatgatgtataggatgcaaccttctagtacaccttttaacatttggctgtgcatgatttcaccaccttttactcaggtaacttgcgttgcaaggtagctgttatccaaattataacccccagtaacttgcaacgcaagttactggggggaaaactttaatgtcccccatactaacgagagggcgaaaagcatatgagaccatttatgccaaagctcgtttactttgaacgaaaggcacttgaatatccacttgattttatagttgcgccaatttaaatgcatgaagaatgggaagaaggaaccgtaaactatttgagcgacaaagatatgacaataccaaatttaacgtttgaattgattcagcatcgttttccaaaaccatcggaaaatatgtatataaaaaggatgatgcagcagtattggaagaaacgataagaggttatataaatgagttttttcctaatgcagaaatacaatattttacttaagggcggtctgtatgcaaatacagattcttttttgttttatatatttaggctcgttttcaacttgtcacgttattctttctggtgtatcattttattgattgcttcgtacggaataagcaaaatgaacttggatggaggaaaccgatgcctacccctagtatggaagattatattgaacaaatttatttgttgattgatgaaaagggttacgcccgcgtatctgatattgctgaatcgcttagtgtacatccatcctctgtaacaaaaatggtgcaaaaattagacaaagatgaatatctaatttatgaaaaatatagagggcttgtattaacaacaaaaggtaaaaaaatcggagaacgtctcgtatatcgtcatgacttgctagagcaatttatgcgtattatcggtgtggatgaaagtaaaatttacaatgatgtagaaggaattgaacatcatttaagttgggaagcaattgatcgcattggtgatttagtggaatactttgaacaagatgcagtccgagtggaaacacttcgtggtgttcaaagagcaaatgaagagaaaagtaattaaggggaacgtatggcgtttccttttttatttcaattcgaaaaggatgggagaattatgaaagcaattatttttgattttgatggattaattgtggacacagaaacgatatggtttcactctttcagagatgctgttcgtgaatacggcggggaactacctttagaggaatttgcgaaatgtattggaacaacagatgaggtactttatacatatttaaatgatcaattaaaagagaagtttaacaaaaatgcattaaaagaaaaagtggcaactttacataaagagaaaatgagaataccagaagctcgtgacggggtaaaagaatatttagaagaagcgaaagaaatgggattgaaaatcgcactggcttctagttcgtctagagaatgggttattcattttttagaagagctacagattcgagaatattttgaagtgattaaaacgagagaagatgttgagaaggtaaaaccagatccagctctttatcgagttgcaatagaagaattaggaattaagccgtctgaagctgttgtatttgaagattcattaaatggattgagagcagcagttgcagcgggattaacgtgcgttgttgtacctaatgatgtgacacggaatttaccatttgaaaatcatcatcttcgaattgaaagtatgagagagaaaagtttaaaagaagtgcttcaaagtataaaaaaagaccgtatttcctaaaaggaagcacggtctttctttttgctttttttgccttcaatgacagttaaatgagactgttttctttttcgtttcaaagtggaagaattcccttttttacttttgtcattagaagtatttgacttaaagaaagaattgcctaggggtgctacattttgtttcccatgtttgcggttcgattgttttgccgcacgcttatatgagctttgtgaatttgcagaaccactggaatttgtaaacatcttgtatagcaagtaaaagataccaacaacaagtaacatgtacccgatatttcttaatacacccatgggatttgtaataacagatgaaacaaggccgaatattgccaatccgataataagcacaaatatagcgaaagtaaacgaacgaccgttcataagggacacctcctaaaaacgtatattaaaattagtatattaacgatgaggaaaggagttgaacaccatttttaaataattattgtttgttctctaaacgtaataattcttcaaacgatgcaattgctacttccacttgatcatctgttggttctttcgttgttaatagttgtagccataatccaggatatccaagtacgcgtaatacgggaatatctcgtaatcgatttgtgaattgtagtacttcaaaagaaataccaagtacaactggaattaataaaattcggtttataactcgtgcccaaagaggatctgtagggactaggaaataaacgaacattccaataatgactgtaaatataataaagctactgccacatctataatggagacgagtttgcttttgaacgttttctacagtcagaggaaggttattctcgtaagcattgattaccttatgctctgcaccgtgatactgaaatacccgcttaataagtggggttaaagaaataaagtatatatagctcaataatagcatgagcttaatgacactttcgacaatgatttgcccagtatgagacgggaaaatcggtcttgttaattcagctaatagtgcaggaactgctgtgaaaatgactttaccgaatataaaagataaaacgccaacagctgcaactcctaataccatcgttaattttgattgttcttcttttttatttgcaatttgttcatcatcttctgggtggacgtcaaatcgttctgaagcgaagtttaaatgctttgctccattcgcacttgcatccacaatagcggcaatccctcgtaaaaatggaattttttttagggtagatagtactttattacgaacgcgtggtaatcgataaaattcaatcgatttatctttacgacgaaccgctgtaacagtatattctctaccgccaaacataactccttctatgaccgcttgcccgccatatatttgttttgactcttctgccatgttaacaccaacctgtatttgtttctctcttatgtagaaaaagaggcaattgtcatactgggttctgtcgttttgaaataagacaatcaccgagtttcctttattttatcggcaaatacaagtagatgacaagggaaaatgttatgagagtcggacatttcttattctttttatagacaaatttcgcaggatttaaacatgcttcaaaatagtttcgggcatactattgagcggaggtgtcgatgtgagtcaagaacaattaggaacaaggaattttgtgcagattggtttgtttggtggaatcttttggggcggggtatggtatttccttcatatattttcattcacggaggcgggcccgaattatttccttttaccatttgcgtttggaagttggaaagagggtgtatggggcaatgtgttcggaatagtgtgtatgggacttctttcaattttgattgcctttttgtataaagcattttttgcaaagtttgaagggattatagcgggaattatttatgggctattttggtgggcactactgtttttggggatgggtttaatggctcctgttattaaaagtgcgctccatttaccaaaagagacaattgtgacgacaatatgtatttttatattgtatggtgtgtttatagcatattctgtttcttacgcagtaaatagcaataaagcagaacaagaagggtaagagaagacgaactattcaaataagtaactcctatgttaaaatattgtatagatatttaatattaaggagttttaagaatatgaaaaagttactcctcgtaaacggtcctaacctaaatcgcctcggtgttcgtgaggtaaatgtatatggaaagggcacgctaacgacacttgaagcagatatgaagcaagaagcagaaacaatgggagtggagttagaatgtttccaatcgaatcatgaaggtgccattatcgacattattcatgaagcggaagatatatatgaagggatcattttaaatccgggagcatttacgcattatagctatgcgattcgtgatgccattgcgagcatttcgattcctgttattgaagtacatatttctaacattcatcagcgtgaatcgttccgtcatgaatctgtgacggcagctgtttgtgcaggtcaaattgtaggatttggtttttatggctataagttagcgttatttgcattaatggagaaattgagggaggcataaagtaatggagaaaattgaaagattacgaagtgcatttgatgaggctggtattgacggtattttgttaacaaatgaacatagtcgtagatatatggctaacttcacaggaacagcaggcgttgttcttatttcaaaagatcgtgctcaatttattacagatttccgttacgtcgagcaggcaagtaaacaagcggttggatatgaggttgtacagcacgcaggattgatcattgatgaagtggcaaagcaagtgaaagagcttggaattcaaaagcttggttttgagcaagatactcttacatatagttcttattcagtgcataaggaagcgattgatgctgaatttatcccgacttctggacttgtagaaaagttacgcttgataaagactgattcagagattaagatattaaaggaagctgcacagattgcagatgctgcctttgagcatattctatcattcattcgcccgggagtatctgaaattgaagtgtcaaatgaacttgaatttttcatgagaaaacaaggagcaacatcttcttcgtttgatattatcgttgcttcaggtcttcgttcggcattaccgcacggcgtggcatctgaaaaagtgatagaaacaggagatttcgttacattagacttcggcgcttattacaaaggatattgctctgatattactcgtacgattgcagtcggtgaaccatctgataaattaaaagaaatttataatatcgttttagaagcacaactacgtggtgtgaacggtattaaagctggtttaacaggtcgcgaggctgatgcgctaacgcgtgactacataacggaaaaaggatatggtgaatactttggacactctactggtcatggaataggtcttgaaatccatgaagcaccaggtttagcgttccgttctcatacagtacttgaaccaggtatggctgtaacagtagaaccaggtatatatattccaggtattggcggcgtacgtattgaagatgatatcattgtgacaagtgaaggtaatgaagtaattacgaaatcaccaaaagaacttattattttgtaatacacaggaggatttttttacatgatttcagtaaacgattttcgtacaggtttaacaatttcagtggacaatgccctttggcaagtacttgatttccaacacgtaaagccaggtaaaggtgctgcattcgttcgttctaaactacgtaatcttcgcacaggttctgttcaagagaaaacattccgtgcaggtgagaaagtagaaaaagcacacatcgaaaaccgtcgtatgcaatacttatacgcaagcggtgaggctcacgtatttatggataacggaacttatgagcaaatcgaacttggtgaaaaacaaatcgagcgcgagcttaaattcctaaaagaaaacatggaagtagcaatcatgacttaccaaggcgaagtacttggtgttgaacttccaaacacagttgaattacaagttacagaaacagagcctggtattaaaggtgatactgcttctaacgtaacaaaaccagctacattagaaactggtcttgttgtacaagtaccaatcttcattaacgaaggcgaaatgcttatcatcaacactggtgaaggtaaatacgtttctcgtgcatagtaaaaaagcactcgtgataattcacgagtgctttttttataggaaatagggtagatagtaaatagctgttattataaaactgactaaaacaagtgaaagagtacccataatagatggagtcaaaacaatttgaaatggttttatttcgccagtctcaacgccagttaatgttttacttattgcgtgatctgtaatgttatttctatggttactcataataattaaccacataattgcaaatattgctaaactaccaaggaaaaaggtctctataaatgaccaaccgaccaataatgaaaaaagataaataagagctaattctactacaacggttaaactaactttcaatgccttcatatttttccccctcattctgtaatttcaaccagtttaaaaaattttcacgtgacacgacatgcagagagcaaggtgactttacttctttctctagtgcagcgtgttcgtctggaaacttgttttccacatgcaatgaaatataaggtagtttttcttgtgcttttaaagagcggatattattcgttttagcaccagcaaatacgtaggaaagttgtaagtctaaaaaggcgattttaaagatttcttttttagcagcctcgttatagccttttccccagtacggatagccgagccaactaccaatgtgagattgctttttctcattattaatatgtttaagtgtggtgaggccaattatttcattttcttcattcacaatcattctcgataaggatttcttttgacgctcttcttctattgcgaaaagaagaaatgttttcgtgtcttcgatattttctaccgttatccccaatgcattttttatatgtggatcacttgatagctcgaaaatcacatttgtatagcataaatctagtggtaataaagtgacgtgctgcatggtttaaacctcttttaaactaaatgtaccataatataccatgaaataatatgaatattcagattgtaattcagactttagagaaaaattatgtttttacttctgaaatagacaacctctgcatatggttgtacaaatatattcttttttagaatacgaagttagtaactgttacgggagaaggtggaagaatgaaacagtggctagcggcaatggaaacatccgtgcttgttatgggggcacttcgattattttcaggtagtgcggagatatttgctgctttgcttatgctttatgtgaatgatgcgaagaaagcgttgtttataaatggtatgttggcgtttgttggacctaccgtattaattttaacaatgacaattgggatagcgagtgtagcaagtgaaatttctttcttgaagctcttttttctagcgcttggaatttgctgtatttttatcgcattactgaaatagtaagtcgagtatagtggggagaagccgatgaaagaggtattagaagttttaccaaaaacgatgaagtacttaattgaagaatgtaagcaatacgatgctttagaggaaattcgcgttcgaattggaaggccgctagagtgtattgcacacggaaaggtgtttttttatgactatatcactactgcagaggatgctatttacttattgaataagttaagtcaattctcaatttatacgatggaagaggaattaaaacgtgggtatgtgacgcttcgcggagggcatagaatcgggttagcaggaaaagtcattacagaaaaaagcgcagtgaaaatgattcgtgatgtctcttcctttaatattcgtattgctcgtcaaaaaatagggattgctgaaccgcttttgccatatttgtatgaaaaaaggtggttaaacacgatggtaattggccctccccaaacgggaaaaacgacactcttaagagatgtagcacgttgcatgagtcaaggggtaagtgcttcggaaattccttcctgtaaagtggggatcgttgatgaacggtcagaaattgctggttgtgtgaaagggatcccgcaatatgattttggtacccgagtcgatgtgttagacgcatgtccaaaggcagaaggaatgatgatgatgattcgttctatgagtcctgatattttgatcgtagatgaaattggccgtaaagaagatagtgaagcaattatggaggcagtgcatgcaggtgtccagctttttataagcgcacacggattttcctatgaggatgttgtgagacgtccatcgctcaaggcagtgctagagcttggtatatttgataggtttgtggagttgtcaaaagcgaggggtccaggaacggttatgcaggtgaaagataaatatggaaaaccagtgttatcaaatagaaaggctgagggcgtatggtgaaaatatttggtgcagtgttaatcgttgcggtcagcacctttttcgggttttcgtacgctaaaagatacagtgagagaccgaggcaacttaggttattaaaatcagcacttcaatcattagaggcagaaattatgtatggacacacacctttatctgaggctgccgagcgattagttaaacaaatgccaaagccattaaattggatatttcaaagtttcgctaaaaaactagaaagtggagaacaaacagtaagggaagcttggatagatagtttgaaagagaattggaagttgacggcttttcaacaaaccgagtatgaaatactgcagcaatttggtgaaacgctcgggcaacatgatcgtgaatcacaacaaaaacatattcgcttatgtattacacatttggagagagaagaagaggaagcgaaagctttacaactgcaatacgaaaaaatgattaagagcttaggggtactagcagggctacttattgtaattttactgctataggggggagaaaggcgatgtccattgatgttggattaatatttcaaatcgccggaatcggcattgttttagctttcattcatactgtactaaaagaattgaagcgtgaggatattgcaaattgggttatccttgtcggttttgtcgtcattttatttcatgttgcatttttaattaatacgctattcgacaagattaaaagtgtctttctcttccagtaaaggaggcggttcgaatcgaaattatacaaattgtcggattaggcctcgttgctacgtttttagctgctgttttgaaccagcataaatctagtattacatctttatttattgtgttcgtaggtagcgtgatgtttcttattttaatcgatcaaattcattctattttacaaatgattgagagagtagcgagtgaagcgaaagttagcaacgtctacgtggaaacgttactaaaaattattggaattgcttatattgccgagtttggagctcaaattacaaaagatgctggtcaaggtgccatcgcttcgaaaattgaacttgctgggaaaatcttaattctcgttatggcaattcctattttgacggttgtaattgaaactattctcggatttttaccgacgggataagggggagtgaatgttgaggaggtttggagctaagctgctatttgcttgcttccttttcttttctttaccggttgttgtacaagcttctcctgtagaaacaaacgtcgttgatcaacaattggataagctcggaattgaagatgtgaagcaattttgggacgggcttgttacaaaatatggtggctatttgccagagagtcaaaaagggagttttatggagtttgtaaagggagaaaaagaattctctctaaaagagtggatgatagggttattaaaatatttatttcatgagcttgcagctaatggaaaactgcttggcacactcattatgctcacaatctttagtgcattgttgcaatcactgcaatccgctttttcaaaaagtagtgtaagtaaaattgctgatgctgttgtatatatggtacttattatttttgctttaaatagtttttatgtcgttatgacatatgcaagagaaacgatacaaacaatggtagatttcatattagcgctattgccaattttattggcgcttatagcgactggtggcggggttgtatctgtatctttctttcatccgattatcattttcttaatgaatacaagcgggcttcttatgaattatatcgttctaccgcttttattactggcaacgatattaagtattgtaagtacaatgagtgatcaatataaagttacaaaattgtccaagcttctgcaaaacgttagcgttgggattatcggtatcttcttaacgatttttttaggggtattatctgtacaaggaacagcgacagccgttgctgatggcatagctgtgaaaactgctaaatttgtaacaggaaacttcattccagtagttggaaggatgtttacggaagcggcagatactgttattagcgcatcaggattattgaaaaacacagtcggaattattgggctcgtcattttatgcttaattgttgcttttcctgcgattcaaattttctgtattgcatttatttataaattcgcagcagcagtattacaaccggttggcggcggagcaattattcaatgtttagacattattggaagaagcatcatttacgtatttgcttgcttagctatcgtatcatttatgttctttttaagtattacaattattattgctgcggggaatattacacttatgatgcggtaggaggtgaagagtatgcaatttgttacagagtggatcagaaatattatcgtttttttgctcttagcgacaatgattcatcttattcttccaaattcgaatttgcaaaaatacgttaaatttgttgtaagtcttttgttagtcgtattaattttaacacccctttttaaactattgcagacagatgtaaatgaagtaattgcaaattttaatgaagaaaagtacgtagcagaaggatctgtaaaaaattcaatagattcgaagaaaaaagaaatacaagctctaacacgtgcatatagtttagaagagatggctaccaaaatgaaaaaagaagtaggaaaagagtttgagaaaaagtatggtatggctgtctctgaaatacaaatagtcgcagcagaaaatatagaagaagtaaagtcagcgaaagatattcaatctgttgttgtgacgttgaaagaaaaagaacgtagtaaaaatgatgcaatcgaaacagtaaagccaattgaaattaacacgaaagagcctccaaaaaaagtggaagaaacgaatgtagaaatgaaagatttcttttcaagcaggtggcaactagagggtaaacaaatccaagttcaaatggaagggaggacaggtagagtaaatggacaataaagataaaaattcgaagttctcattttttcgaaacttattgaatggggatcaaaaagaaagcaacgagaagggtaaaaaggtaacacctaagtttttacttgtcctactcatacttggaattttgcttatgttttctagtagtctcttttcaagtaaaaaagaagaagtacctgtatttaaagaacaaaaaactcaaaaccaagaaaaagacgtaccaactttcggacaaaaaagtaatgatagtatgtcaaatgtagaaaaatatgaaaaagcgtatgaacaagaattaaaaactgctttagaagaaatagcaggagtaaaagacgtaacgattaaagtgaatttagattcatctgaagaaaaaattttagaaaaaaatacagtgaaacgctcacaaacaacaggtgaaacagataaaacaggcggtaagagagaagtagaggacgagtctcttgatgaaaagactgtcattatacgtgaaggggataaagaaactcctgttgttttacgaacagagaagccgaaagtacgtggtgttcttgtcgtagcaaagggagtggataatatacaagttaaagcaatggtaaaagaagctgtgataaggctgctagatgtaccggcccatcgcgtttcagtttcaccgaaaaattgatagggaggaaataaagtgttaaaaaaacaaacagtttggttattaacgatgttaagtttagttgttgtactatctgtgtattacgtgacaactcctgacaaaatgaatacagcatcgccagcaacaggtgaaaagattggacaagaaaaacaaggtactgataaagcagtaacaaacgaagcgcctaaagaaactccgaaaaaagaaaatacaagcaaagaaacaacgaataaagaaacagacaaaaaagaaaatgcaaaaaaagaaacaagtaaaaaagagggcaatgtatcagttcaatcaagtgatgagaatttcacagctttacgtatgcaaatggaagatcagcgtagtgaacaaaaagcaaaattacaagaagtgatgagttcaacaaaagcttcagcaacagaaaagaataaagcgaaagaaaattttgatgccattacgacaatggaaacgaagcaagaattacttgagacagtaattaaatctcaaggaggatatccagatgctcttgtaagagctgatggtactgatattagagtaacggttaaagcggcaaaacattcacagaaagaagcaaataaaattattcaacttgtaagaagtgaaggcggatcaaaagatgtaggtgtgaaatttgatccaccagcgaaataagtgaaactttaatccgtagggatttccctacggattattatcttttactaagcaaagggtatgcaaatagtaaaaagagtatgtaagtacgtgtgaatagaaaaaagctatcattttcgatagcttttttctattgcgtctttgtaattatttttactatgttcagctcggaatggagaaacacgttgtgagtaaaagattaatggttcatggtactgatgattactttttccggatttgacgtggatgcaaagaacgcatgcccaaacgattacagcaggtaaaaagagaatgagccatatcatatttccacacctcgacacaatatattttctacactttgaacatactattcttatatgaaggaatgatgaacggtgtgtaaacaaaaaaaaaatatttggtaaaaatatgttattgactataggtgtggtgaagagggaatggcatgtttgctgtgtaacgttttgaaaaagtagtgaatgttttttaagaagtggtcttgccaatttcgtgtgaaacttggtattattactaggtattaaatttttattggaataatatttttacaggagtttcgatttattataaagaaatataaattggaatgtttaaaaaatttatcgtaagatggaaatagtaaatatttctattagttaatgaaatatattttctaatagaatacatcgtatttttacagtcaatctagttttcgtgacgagaatctgtaaaaacgggacaaacaagagtatgggagtggattttacatgtttaaaattcaagaagttcgcgaattaattaaattaattgatagctctaatattgatgaatttgaatacaaaaaagacggtacaacaatcaaaatgaaaaagcgtggtaatgaagttgttgctgtgcaagcacctgcagcaaaacaagctatgcaaccagtagcgcctgttgaagttgaaacgaaagtagcagcagcacaagcagaagcgccaaaacaagaagagaagaaggctgttcaaaatgaaaacctacataaaatcacatcaccgatggtaggtacattctattcttcttcttcttcttcgcctgatacacctccatatgtaagtgttggggatagagtatcgaaagattctatcgtgtgtattgtcgaggctatgaagttatttaacgaaattgatgctgatgtagagggcgaaattgttgaaattcttgttaataacggacagcttgttgagtatggacaaccgctatttcttgtaaaagcgtaataagggagtctttgtgatgataaaaaaagtattaatagccaatcgtggggaaattgctgtacgaattattcgtgcttgtaaagaaatggatattgaaacagttgcaatttattcagaagcagataaagagtcacttcacgtacagattgcagacgaggcgtattgtgtaggaccaacgatttcgaaagaaagctatttaaatttgacgaacattattagcgttgcgaagttaacaggctgcgatgctattcatccgggatacggatttttagcagagaatgcagatttcgcagaattatgccgtgaatgtaacttgatttttatcggtccaagtccagaagctatttcaaagatgggcacaaaagacgttgctcgtgatacaatgaaagaagcaggggttccgattgtaccaggttcacaagggattattaaaaataccgaagaagcgatcgagcttgctaatcaaattggatatccagttattattaaagcgactgcaggtggcggcggaaaaggtattcgtgttgcacgccatgaagaagagcttataaaaggaattcaaattacacagcaagaagctagtaccgcttttgggaaccctggtgtatacttagaaaagtacgttgaagatttccgccatgttgagattcaaataatggcagatacacacggaaatgccattcatttaggagagcgtgattgtacaattcagcgccgtttgcaaaaactactagaagaaagtccatcacctgcacttgatgaagatattcgcaagcagatgggtgaagcggcagttaaagcggcggtagcggttgattatacaggtgctggtacggttgagtttatttatgaatataaaacgaaaaccttttatttcatggagatgaatacgagaattcaggttgagcatccggttactgaaatggtaacgggaatggacttaattaaagagcaaattcttgttgcttcaggagaaaagttatcgttacagcaagaagaagtacaatttaatggttgggcaattgaatgtcgaattaatgcggaaaaccctgccaaaaaatttatgccatctccaggtaaagtagaaatgtacttaccaccaggaggatttggtattcgcgtcgattcagctgtatatccgggatattcaatcccacctttctatgattcgatggttgctaaattaattgttcacggaaaaacacgtgaagaggcaattgcaaaaatgaagcgcgcacttagtgaatttgtcattgaaggcgtacatacaacaatcccgttccatttgcaattgctagatcatcctgattttgtaaaaggtgagtttaatacgaaatttttggaagagcatgaacttgtgacgcagtgatacattaaaggaggtttttttcatggctgaacatatgttagatatgggtcaagatacaactcttggtaaagtagaaattgcaccagaagtaattgaagtaattgcaggtattgcagctgctgaagtagaaggtgtagcggcaatgcgcggtaattttgctacagatgttgttgagaagttaggtaagaaaaatcatggtaaaggtgtaaaggttgaattagcaaacgaagatattatcgttgacctttatgttgtaatgtattttggtgtagcaattccagttgttgcacaaaagattcaagacaatattcgccaagcactctttacaatgacaggacttgagccaaaagaagtgaatgttcacatcgttggcgtaacattcgaaacacaaaaaacagaaatcgaaccagtgtaagaatgaaaaggtgcctagtaacataggcatcttttttatcgtttcatttcttcacaaattacaaccctctaattattatactatttcaaaaaataagaaataaacaaggaaatgtgtcgtttttccaaaaaacgtacattgtgataagatatggaacttgaagttaatctttttattatttttcagccttgtaacccgtgtgtgaaacgataaattgtgttattatcattgtattataaggttggaaaatcaatgaaaactgtaagagtaagtgaattgacggcttataaattataataatataacaaagtataaggaaagacttgaagcataaaggagagttacaatgaaacgtaggacggctagagaaagagcaatgcaagcattataccaaatggatattacaggtgaattagaaccgaaagtagcagtggaaaacacgctggatgaaggcgaagaaacaaatgagtttctagagtcacttgtagtaggttttgtagaaaataaagaagcaatcgatgaagcgattcgtcaaaacttaaaaaagtggaagcttgagcgtattagtattgttgatcgcagtattttacgtgtagctgtgtatgaaatgaagtacatggaagaaattccacacaacgtaacaattaacgaagcaattgaaattgcaaaaacatttggggatgaggaatctcgtcgttttattaacggcgttttatctaatataaaagatacactgtaaattctttaagggggaatcttaaaatggtagcagtaatcatcaaaggaaatgaagttgcggagaaaaaacgagcacaattaacagaagaagttgtgaagttgaaagagcaaggtattgtaccaggattagcagttattttagttggagaagatccagcatctcgttcttatgtgaaaggaaaagaaaaaggctgtgaacaagtagggatttactcagagctaattgaacttcctgaaacaattactgaggaacgtttgcttgctgaaatcgatcgcttaaatggagatgaccgtattaatggcatattagtgcaattacctttaccaaaacatattgaagaaaaagctatcattgaaagaatttcaccagaaaaggatgtagacggatttcacccaatcagcgtgggacgtatgatgacgggacaagatacattccttccatgtacaccgcatggtattgtagaattagtaaaagaaacaaatcttgatatttctggaaaacatgtagtagtaattggaagaagtaatattgtcggtaaaccagtgggacaattgtttttaaatgaaaatgccactgtaacatattgtcattctaagacgcaaaatatgaaagagttatcgaagttagctgatattttaatcgtagctgttggacgacctaaaatgataacagcggattatattaaagaaggagcggttgtaattgacgttggtgttaaccgtttagaaacaggaaaactttgtggtgatgttgactttgacaacgtgttagatgttgcgggttacattacacctgtgccaaagggtgttggtccaatgacaatcacaatgcttcttcataatactgttgaatctgccaaacgtgcaggtgtcgtttgtaaataatttgagtcggctatgaggagagagaaatggagaagcaatatttaaccgttacagcgttaacacgctatataaaaacaaaaatagaatatgatccgcatttgcagtctgtttggttaaaaggtgaaatttccaactttaaaaatcatagccgtggccacatgtattttacattgaaagatgaaaatgcaagaatcgcagcggttatgtttgcgggccataatcgtaatattaaattcaaacctgaaaatgggatgaaggtactcgtgaaagggaaaatctctgtttacgaggcgagtggttcttatcaaatttatattcaagacatgcagcctgacggagtcgggaatttacatttagcgtacgaacagttaaaagttcgtttagaagaagaaggacttttttctcaagtttataaaaaagcgattcctccttacgctaaaacaataggtgtgattacgtcgccaacaggagcagcgattcgtgatattataacaacgattaaacgtcgttatccaattgggaatgttattgtatttccggtacttgtacaaggggagtcagcggctccctcgattgtacaagcgattcgtacagcgaatgaaatgggagagatagatgtactaatcgttggtcgtggtggaggttctattgaggaattatgggctttcaatgaggaaatggttgcaagagcaatctttaagagtgaaattcctattatttcggcagtaggccatgaaacggattttacaatcgcagattttgttgcagatttacgcgcgccaacaccgactgcagcagctgagctggcagcacctaacattatagagttacaagaaaaggtattacaaagaactctgagattgcaaagagcaatgagagagttagtacataaaaaagaagaaaaactacaagtgttgcaaaaatcgtatgcgttccgttatccaagacaagtatatgagcaaaaggaagagcaattagatagagcgctagaacagcttgttttagcgaaagagcgctatattgataaaaaggtgaatcagttaaagcaactttcattttatttagagaagcaccacccatctcaaaaaattatgcaaacgaaggtagctgttgaaacgttgcaaaagcaattacaacgtgaaatgcaaacgttacttcaaacgaaagaatttgcctttgtaagagctgctcaaaaacttgaagcgttaagtccgcttaaagtaatgatgagagggtacgggcttgtatatgatgaagagaagcaagtgttaaaaagtgtgaaagatgtaagccttggagatgctgtttcagttcaattacaagatggaatactagattgtagcgtatcaggcatagaggagcgtgaattgaataatggaaaataaattaagctttgaagaggcaatttcgcaacttgagcatcttgtttctaagctagaacaaggtgacgtacctttagaagaagcgatttcttattttaaagaaggtatggaattatctaagctttgtgatgagaagctgaagaatgtacaagaacaaatggcagttattcttggggaagatggagagcttgaaccgtttactgctttaggagatgaagcatagtgacgattgcttttgatacttttttgaaagaaagtaaaactttcgtagaagaaaaacttgtaagctatgcaaatgaattacaatgtccaaatgtacttcgtgaagcgatggcatattctttggaagcgggtggaaaacgtctccgcccgttacttttgtttgcaacattacaagcgtttgggaaagaaagaaatcttggagtaggtgcagcttgtgctcttgaaatgattcatacatattcattagttcatgatgatttaccttgtatggatgatgatgatttaagaagaggaaagcccacaaatcacaaagtatttggtgaagcgatggcagttttagcaggagatggcttattgacgtatgcttttcaagttattatggcatatgagcaaaaagaaatttctgccgaaaaaaaagtaagacttgtacttgaacttgcaaaagcagcaggaccagaaggaatggttggcggacaagtggcagatatggaagctgaagggaaacgccttacgattgatgaattggagtacatccataaacataagaccggaaaactgcttgaatttgctgtacttgcgggtgcgatactttctgatgcgacagaagagcaagaagaaaagttgcttacgtttgccaaatatatcggtctagctttccaaattcgagatgatattttagatgtcgaaggaactgaagaagagattggaaaaccgattggtagcgatctttctaatgaaaagagcacatatacaacgttgtttactgtagatagagcaaaggatattttagaagaaacaattgcagaagcaaaaggtgcgattagttccttgcaattacaagatgaatatttactatctatttgtgatttgattgcaaaacgtaataactaatataacagcgttttcatttgttgagtcattcatcattttatgatataaatgtaggaaaaggtttttcttttcttgttattggcaaaaatatatgtagattacattgccgttatcacttcgtgttagcggctatttttttcatcgcctaaagaaatatggtttataataggattagggcgcaatagactggttaatagcgggacaagacgaaaaatagaaaagagaatttcttgttttgtgtaaatgttttttataatatttgacatgttgacagattatgaaatgaaagtgagtgatccatgtggatctaacgcaaattcaaaaccctagttttttgaaagatatgtctatcagtgaactagagggattgagtgaggatattcgtaagtttttaattgaagagctctctcaaacaggtggacatattgcacctaatttaggtgtagtagaactcacaattgctctgcacaaattatttgatagcccgcaagataaatttttatgggatgtaggacatcaatcctatgtacataaaattttaactggacgtgcgaaagagtttggtacattaaggcaatatcaaggtctatgtggtttcccgaaacgttgcgagagtgagcacgatgtatgggaaactggtcatagctcgacttcgttatcggctgcaatgggaatggctctggcacgtgatttaaagaaaacgaaagaatatgttataccaattattggagatggtgctttaacaggcggaatggctttagaggcattgaaccatattggacatgaaaaaacagacatgattgttattttgaatgataatgaaatgtcaattgcaccaaacgttggtgcgcttcataatgtgctcggtcgtttacgtaccgcaggaaaatatcactgggtaaaagatgaattagagtatatattaaagaaaatcccagcagttggcgggaaagtggctgcgacagcagagaaaataaaagatagtcttaaatatttactagtatctggtgtctttttcgaagagttaggctttacatatttaggtccagtcgatgggcatgattatgaaaagttattcgaaacgttgcaatatgcaaagaaaacaaaaggcccagtgcttgttcacgttattacgaaaaaaggaaaaggttataaaccggctgagagtgacgttattggaacttggcatggaacaggaccttataaaattgaatcaggtgacttcgttaagccgaaagaagttgcaccagcatggagtgctgtcgttagtgaaacagtacttaagctagcgagagcggatgagcgtatcgtagcaattacacctgcaatgcctgttggatcaaaacttgagaaattccaaaaagaattcccagatcgtatgattgatgtaggtattgcagaacagcatgctacaacaatggcagcaggtatggcaacgcaaggaatgaagccattcttagcgatttattcaacatttttacaaagagcatatgaccaagttgttcatgatatatgccgccaaaatttaaatgttttcatcggaatagatcgctcgggattagtaggagcagatggtgaaacgcatcaaggcgtatttgatatctcattcttacgtcacttgccgaatatggtgcttatgatgccgaaagatgaaaatgaagggcaacatttagtttatacggcgatgcaatatgaagatggaccaatcgcattgcgttatgctcgcggtaatggacttggcgttcatatggataaagaattaaaggcgattccaatcggtacgtgggagacgttaaaagaggggacacaagcagctattttaacgtttggtacgacaataccaatggcaatggaagcagctgagcgtcttgaaaaagctggggtttcagtgaaagtagtgaatgctcgctttattaaaccaatggatgaagcatatttacatgatcttctaggaaagaatataccgattttaacgattgaagaagcttgtttaatcggtggttttggaacaggagtagttgaatttgcatctgaaaatggttaccatagtgcattagttgaacgaatgggtattccagaccgcttcatagagcacggaagtgtaacaaaattattagaagaaattggtttaacgacagatgctgttgtagaccgtattcatacaatgattccatcaaaacaaaaaagggcgtaacaaatgagcgtaaaaaaagaaagagtagatgtactattagtagagcgaggacttatagaaacgcgtgagaaagcaaagcgcgccattatggccggactcgtatatgcaaatgagatgagacttgataagccaggagagaaaatctcgcaagatactgagattacggtgaagggacaagttatgccgtatgtaagtcgtggtggttataaacttgaaaaggcattagagacatttcatcttgatttacaagataaagttatgatagatattggttcatcaactggtggctttacagattgcgcgcttcaaaatggagcgaaattatcttatgcattagatgtaggatacaatcaactagcgtggaaattacgtcaagatgagcgtgttgttgtaatggaacgaacaaacttccgttacgtgacaccggcagacttagaacgtggtttacctcaatttgcaagtattgatgtttcatttatatcattaaagcttatactgccagttttaaaaacaatgcttatgcctaacggagatgtagcagcgttaattaaaccgcagtttgaagctggaagagagcaagttgggaaaaaaggtatcgttcgtgatagaaaagtacatgaagctgttgtagaaatgattgtcgagtttgctttaaaagaaggctatgatgtggaaggtttaacattctcaccaattacgggtggggatggtaatattgaatttttaattcatctgaaatggcatggtgaacgtgagaatggcgaaaatcattctccgatttctatagagcaagttgttacagaagcgcatgacgttctaaaacaaaaagggaaaggggaataacatatgttgttcctctttttgctgtaattgtataatgattgtaaaaacaattgtgtacaagaaacgaattataagttaacataaataagtgaagtataccaatgtttaaactatggtaagagatagtgtgaggtgcaaatgtatgaataaaggtcagcgccatattaaaatcagggaaattattgcaaacaaagaaattgaaacacaagatgaattagttgatattttacgtaatgagggatttaatgtaacgcaagcaacagtatcgcgcgatattaaagaactgcacttagtgaaggtgccattacatgatgggcgctataaatatagcttgccagcagatcaacgatttaacccgttacaaaaattaaaacgaaatctagtggattcatttgtaaaattagacacggcaggacatatgcttgtgctaaaaacattgcctggtaacgctcattcacttggagcacttattgatcatttagagtgggatgagatcatcggaaccatctgtggtgatgatacttgcttaattatttgccgtacacctgacgatacaggtgttgtctctgatcgtttcttaaatatgttgtaacaaaaaatcttgtttgctttccatcgtaaagtggaaagtgaacaagatatttttattggttaaaaatatgaattttcaattgtaatataatattttgtttgcataaagttaaaaaatagatggattgacccgtaaaacaaatgtttggtacaatgaagcgggttagaagagtatatacatacaaatatatagcatgattatttgaatgaagaactgagaaaatcctttagtaagggattattttataacgaggtgaatggggcattgttatcggaattatcgattagaaactttgctattattgaagcattaaatatttcttttcaaaaaggtttaacggttttaagcggtgaaacaggggccggaaaatcgattattattgatgcaattagtttacttgtaggtggccgtgggtcagcagaatttgttcgatatggaacagaaaaggctgagattgaagggctattttatgttgaagatgagaagcatccatgtattgaaaaggcagaagagttagatatagaaatagaagatggtatgattattttaaagcgtgatattgctgcgaacgggaagagtgtatgtcgtgtaaatgggaagcttgttacacttagcatattaaaagaaattgggaaaacacttgttgatattcatggacagcacgaaacgcaagatttaatgaatgaagaacgacatctgtttatgcttgatcactttgatggggatcgaatcgttaaacaattagacatatatcaaaacgtatacgctgactatgaaaaattaaaaaaacaattgaaatcgttaagtgaaaatgagcaacaaatggcacatcgcttagatttaattcaatttcagcacgaggaaattcgcaaggcggatttaaagatggatgaagaaaatgaattaactgaggaacgattgcaaatttctaattttgaaaagatttataaagcgttaggtgatgcatatcgttctttaagtgccgacggacaaggattagataatgtaagaagtgcaatggggcaaatggaaagtattacacatttagatgaagtgtatcaagagaatcatgattcaattgcaaatagctattacttattagaagaggttgcctatcaactgagggaaaagctcgatatgatggaatatgatccaaatcgtttagatgaaattgaaacacgtttgaatgaaattcgtatgctaaagagaaaatatggaaataatgtagaagagattttagcgtatgctgataaaattgaacaggaaatttttacgattgaaaataaagacgttcatattgaaacgacgaagaaacagttgaaggaattagaaagtgttattatgaaagaagcaacgttgttaagtgatatgcgtcatgagcttgcagaacaccttacaaatgcaattcatcaggaattaaaagaattatatatggaaaaaacgaaatttgaagtgagaattatgaagagagaaggaaatgcagaagagccccttgtggaaggtgcgccggtaagacttacggcggatggttacgatcatgtggaattttatatttcaacgaacccaggagagccgctaaaaccactttcaaaggttgcttctggcggagagttatctcgtatcattttagctttaaaaagcattttttctaagcatcaaggggttgcatctgttatttttgatgaagtggatacgggtgtaagtggccgggtcgcacaggctattgcggaaaaaatttatcgagtatcagtaaactcgcaagtactttgtattacgcacttacctcaagtagcttcaatggcggattcacatttatttattcgaaaacaagtagcgaatgatcggacaattacatcagttactgttttaactatggaggataaagtaacagaaatagctcgaatgatttctggtgtggaaatcacagatttaacgacagagcatgcgaaagaattacttacgcaagcgcatcattttaaacagacagcagaggctatccagtaatggatagctttttttctcaaatgacgatttcttaattcttccggttataaataaagcactgcaaggagagattaaaaagtgaagccaagaggctgaatgtggggtaggagcgaggagagtgaacaagttgaaattagaaaaatttcgaaaaataataggtctttgtctccttgtttctttagtttttattggatgttttaaaccgcttcgaacgtttatttcatcaccgaaacaacttgttgtttttgaagggcaacaatcagaaatatcatcattaccagttttcaaagcttcatccacaaatcgtcatgtatttacagtgagttcgaatgaacaaaaacaaggacttatggtaaattctcatcaaaatggtgaagctgatatggtatttcagcttgctggttttccagtgaaaaaagtaaatgtgaaagtgttaaaagattttaaagtgattccaggtggacaatcaattggtgtgaaattaaatacaaaaggtgtacttgttgtaggccatcatttaattcaaactgaaaaaggtaaaatatctcctggtgaaacagcaggtgtacaaattggagatatgattactgaaattaatggtaaaacaattgaaagaatgagtgatgtagcaccgtttattcataatagtggagaaacaggtgaaccgcttactcttgtattgttaagagatggaaaatatattcgtacgaagctaactccacaaaaagacaacggtgaatcgtcttatcgaattggcttgtatatccgtgattcggcagctggaattggaacgatgacatttgttcatccagattctatgaaatatggggcacttggtcatgttatttctgataatgatacgaaaaagccgattcaagtcgaagatggacaaattatgcgctcgacagttacatcaattgaaagaggtagtcatgggaatccaggggagaaattagcaagattctcaccagaccgtgaagtgattggcaatattacaattaatagtccatatggtatttttggaaaattaaatacgaatatgaaaaacggtataatggataaagcaatgcctatcgcattatctcatcaagtaaaagaaggaccggcaaaaatattaacagttattgatcaagataaagtagaagcgtttgatattgaagttgttagtacagtgcagcaaaaattcccagccacaaagggtatggtaataaaagtaacagataaacgtctattagcgaaaacgggcggtatcgtacaaggaatgagcggaagtccaattgtacaaaatggaaaagtaattggtgctgttacacatgtatttgtaaatgatccaacatcaggatatggtgttcatattgaatggatgttacatcaagctggaattaatatttatgatcaagagaaaaaagcgagctaatatatattattagctcgctttttctgttgaaaaattcgttgaaattttgtaaaagctccgcaagaggtgttttttgttgtaaaataaaaggaaagggttgaacgtttcgttgtatttctatgatggaatgtgttgcgaaagggaataaatgagcgataaacatatttttttgtgattttatcggaaagtaagaaactttaaaagggaattttcacacaattgtcgaacaattcatgtagcctagaaggatacacatgtcggagaatcgattcggtaagggaggaaaagctgtggagaaaattaaagtatgtcttgtggatgataataaagaactagtatcaatgttagagagctatgtagccgctcaagatgatatggaagtaatcggtactgcttataatggtcaagagtgtttaaacttattaacagataagcaacctgatgtactcgttttagacattattatgccacacttagatggtttagctgtattggagaaaatgcgacatattgaaaggttaaaacagcctagcgtaattatgttgacagcatttggccaagaagatgtgacgaaaaaagcagttgacttaggtgcctcatatttcatattaaaaccatttgatatggagaatttaacgagtcatattcgtcaagtgagtggtaaagcaaacactatgattaagcgtccactaccatcattccgatcagccacaacagtagatggaaaaccgaaaaacttagatgcgagtattacgagtatcattcatgaaattggtgtacccgctcatattaaaggatatatgtatttacgagaagcaatctccatggtatacaatgatatcgaattattaggatcgattacgaaagtattgtatccagatatcgcaaagaaatataatacaacagcaagccgtgtggagcgcgcaattcgtcacgcaattgaagtagcttggagccgtgggaatattgattctatttcgtccttattcggttatacagtatccatgtcaaaagcaaaacctacgaattctgagtttatcgcaatggttgcggataagctgagacttgaacataaagctagttgagagtaaaagtagtaagggatttaagttttagtaaagcttaataattcttgaaattgatactcgatatcaaatttaaaaccaatgaactttttatttaaagaccaatgaatgttataattcgttggtctttttattttgttgagaaaaagagattatttgatagtatggaaaataaaacctatttttagtaatattacatgtaagtgagttttttataaggcaataaaatagatatagatagggagaaggggaatggaaaataaaatttcaacttggctaggaatagtagcagctatgggagttcttgctattgcagttacatttggaatgttagaacttgcagataatcccgtagataaagaagtgagcgctcaaatagataaaaaagaagaccaaacaatagtaggtagagaggtagatggggtctttgttgatgtgtatgttactgaaaattctactgaaagcgaagtcattacagcgatgcatcgcatgactcatcaaaaagtggtggcagaacgaaaatcgggctctatcccaatgattcaaagtaatgctaaaaaattaaaagaaattataaataagagtagctttgcgaagaaaaatgaacttttagcaattgctgatagatgggcgaaaaaagattttagtaaaattgtagaagatcacaattatttctcggatgctcaagaagatagcgtttgtaaagcaactagagcaatggatgcgttagaagagcaacattatattttaactacattcggggaggaaaaagcgaaagaactatacgaatcaggggatgctccgcacgttcaataaaaaacaatataaagggcttctagtttttttatgatcgtgtttttaggacgcaatggggacttataaataaatggtctgctttctttatgacgtgtaacaaaaaagaaaagatgtgattcattattaaatgatgaaggaacggctaaatcacatcgtagtacatctgttaaaggattttagtaggaaaggcatccgtgatataatagaaaataataaaaagtcctgcaaaacaggactgtattattcttcgtctttattttgtttttctaattcaactagtttttgaattaaaatgtgctgcggcatatgcatgagttgttcaagtggaacacctagtgcttttgataagcggactgcagtatctggagagatttgtaatggtctcatagaagtacctcctttttcgtatagtatagcataagattgggggagtgaggatgactcttatatttgcacatcgtggtgcggctggaacgtacccagaaaatacaatgatttcatttgaagcagctgagtcttttagagcggatggaattgaacttgatgttcaattaacgaaagatggaaaagttgtcgtcattcacgatgaaacggtggaccggacaacaaatggaaaaggtgcggttcgcaattatgtatatgaggacttatgcaagttagatgcaagttataaatttggtgataaagtaggtttttgtaaaataccacttttagaagaggtattagaatggcttgaacaaacgagtttgctacttaatattgaacttaaaaataataaaattccatacagaggtttagaggaagaagttataacgcttgtacggaaatttagtctagaggatcgtgttatattttcttcgtttaatcactacagtatgaaacggtgccatatgatggctcctgatattcaaacagcaattttatatcgcgaaggtttgcatagtccgtgggcatacgcgaaaaaaatgggggctacagcagtacatccgaattatcgttatcttcaagatgctattgccgaactaacgatggaaagtggtgtagaagttcgcccttatacaattaatgaagaaacgcttatgcgtaaatattttgatatgaatatatcggcgattattactgattaccctgaaacggcaagaacgttattgccaataaaaaaatgagaccgcgtgtaacggtctcatttttttatttataaatagtggggcattcctatcttctaaagcgagcttgtactttatttcgtttgcgatctcggtgcaagacgaagccaccaaagatataaaacccgagcgcgaagcagagagcgccgattaaaaattgtaaccacagtatggaaattggtggaaatagaatcccgaatacagtatctctcattaactttataccaaacacagctaatgaaatagggataagtgctaatagtagagcaacgtaacgctgcatacataacgctccttttcagattatttcgtatattttaatgatgttatacggaaagggggtttgtcaagagggtgctgaacgagtaagataagggtgtgaaaaaatttgcagagttacttcgagaggaagtgtaatatatgaaacaaaaagtattaattgttggtgcaggtgaaggcgggagcgcgctgctgaatctgttacaaagttcgaatatatttcaaattatagggattattgatataaatccgttggcaaaaggactacaaattgctaaggaatacgggattgcaattggagaaagtgtaactccatttctttctatgcatatcgatgtaatatttgatatgacaggtgaagatgatgtacataaagttttattagaaaaaaagaaaaaagacactcttcttataccaggtgatatcgcaaaaattgttacaggattagcgcatgagaaggaagggctaattgggcggttagaggaacagacgcaacaaggagaattaattttaaattctacacatgacggcatgattgtaattgatcgagagggacaagttcgtctttttaataaaagtgcagagcgtattatcggatataaaaaagaagaggcgataggaaagtatattttagaagtcattccaactagtaaattacttcgcattatacgtacgaaacaaatagaagtaaattatgaactgacattagagaatggaaagaaaattattacaacgcgtattccaatattaaaagaaggaggagaggtacaaggggcatttgcaatttttaaagatataacagaagttgtagatcttgcggaagaagttacagacttaaaagaaattcaaacactattagaggcaattattaactcatctgaagaagcgatttcggttgtggatgaaaaaggaagaggtttagtcattaacccagcatatacgaaattaacgggtttaacagaagaagatattattgggaagcctgctacaactgatattgtagaaggcgaaagtatgcatatgaaagtacttcgaacgcgtcgtgcggtgcgcggaatacatatgaagattgggcaaaaaaagcgagatgtaattgtaaacgtagcaccagttattgtggatggaatattgaaaggaagcgtcggtgttatccgtgacgtgtcggaaattcaaaaattaacaaatgaattgaatagagcaaggcaaattattcgtacattagaagcaaaatattcatttgatgatattgtcggaaattcagatgaaacaacggcagctatcgaacaggcgaagctaggagcgaatacaccagcaacagtactgttacgcggggaatctgggactggtaaagaattgtttgcacatgcaatccataatggaagtaatcgaaaatacaataagttcgtccgtgtaaactgtgcggccatttcggagacgttgttagaaagtgaattatttggttatgaggaaggggcgttttctggagcgaaaagaggcgggaaacgtgggttctttgaggaagcgaataacggtagtatttttttagatgaaataggggagttgtctgcaaatacacaagcgaaactccttcgtgtattgcaggaaaaagaaattgtaaaagttggtggaacgaaagcgatacctattaatgttcgagtaattgcagcgacacatgtgaatttagaaaaggctattctagaagggaagtttagggaggatttatattatcgattaaataaaattccaattcaaattccatctcttcgtcaacgtaaaggagatataccgacaattgcggacagattgattcaaaaaattaatcaagattacggtcgtaatgtagaagggctcactgattcagccgttttatatttacaatcatacgaatggccaggaaatgtgagggaacttgaaaatattttggggagagctattatctttatgaattataacgagacctatattgatgtacaccatttaccgccattacataacgaagagcaggtggagtcaaagcaatctcatttattacctgaattagaagaaaagccacttgaacatttagtgacagagtttgaagggaatattatttatgaatatttggagagatttgatgggaataaaacacaaactgcaaaagcgttaggaatttccgttcgaaatttatattacaagctagaaaagtatgaccatgcaaaaaatagcatgcaataaattgcgtaccatgcaatttattgcatggtatacaaaaagcgacaaaataagacagaatctttcgttattttctaaagtattgattttactgcattttgaatgcgttttcattattggtaagaccacttttaaaagttggcacggtatttgctttataaatagacgagggacgacggaaagggttgattacaaaatatgaagttagaatacttaattgatcaagcagcaggaaagcctaaaaaaactgtggctgtagcagtagctgaagatcatgaagtaattgaagctgtagcgaaagcaattaaattacagctagctcaatttcgtctatatggaaatcaagaaaaaataatggggatgctacaagaacatggtttacaaacttcagaacatgttgaagtgattgcagcaatgtctagtgctgaagctgcagaactttctgttaaagctgtgagaaatggtgaagcagatgtgcttatgaaggggaacatcccaacagcgaatattttgaaggctgtgttaaacaaagagtggggcctacgtaaaggtagcgtactttcacatgtagcagcatttgaagttcaaaattacgatcgtcttattttcgttacagatgcagcgatgaacatcgcacctgacgtaacacaaaaagctgctattatacaaaatactgtagaagttgcccgggcaataggaatcgacttgccaaaagtggcaccaatcgcagcagtagaagttgtgaatccagcgatgcaggcgacaattgatgcagcgatgttaacacaaatgaatcgccgcggacaaattaaagattgtatcgttgatggaccacttgctttagataatgcagtatcacaaattgcagcagaacataaaggcatagtaagtgatgtagcaggtaaggcagatattttactcgtcccaacgattgaagctggaaatgtgctatataaatcactcgtatactttgcggatgcaaaagtaggagcaatgattgctggcgcaaaagcaccaattgttttaacatctcgtgctgattcagcagaaacaaaagtatattcattagcattggcagttgcgactgcttcaaaataaaccaaaaagggtaaaacattagggggaaacgacaatgacattagaaatcttcgaatacttagaaaaatatgattatgagcaagtagtattttgtcaagataaagaatctggtttaaaagcaattattgcaattcatgatacaacacttggaccggctcttggtggaacaagaatgtggacatatgattctgaagaagcggcgattgaagatgcattgcgtcttgcaaaagggatgacatataaaaacgcagcagctggtttaaacttaggtggtgcgaaaacagtaattatcggtgatcctcgtaaagataagagcgaagcaatgttccgtgcactaggacgttatatccaaggactaaacggacgttacattacagctgaagatgttggtacaacagtagatgatatggatattatccatgaagaaactgactttgtaacaggtatctcaccatcattcggttcttctggtaacccatctccagtaactgcatacggtgtttaccgtggtatgaaagcagctgcaaaagaagctttcggtactgacaatttagaaggaaaagtaattgctgttcaaggcgttggtaacgtagcatatcacctatgcaaacatttacacgctgaaggagcaaaattaatcgttacagatattaataaagaagctgtacaacgtgctgtagaagaattcggtgcatcagcagttgaaccaaatgaaatttatggtgttgaatgcgatatttacgcaccatgtgcattaggcgcaacagttaatgatgaaactattccacaacttaaagcaaaagtaatcgcaggttctgcaaataaccaattaaaagaaaatcgtcacggtgacatcattcatgaaatgggtattgtatacgcaccagattatgtaattaatgcaggtggcgtaattaacgtagcagacgaattatatggatacaatagagaacgtgcactaaaacgtgttgagtctatttatgacacaattgcaaaagtaatcgaaatttcaaaacgcgatggcatagcaacttatgtagcggcagatcgtctagctgaagagcgcattgcaagcttgaaaaattctcgtagcacttacttacgcaacggtcacgatattattagccgtcgctaatcattcatatataacttttacaaaaggcgtggttatctcgtatgaggtttccacttccttttgaatttattagtggaggtagcaacattgtctgtaaatcgaattcttgttattaacccaggtagtacatccacaaaaattggtgtttttgataatgaaagacccgttttagaagaaacgattcgtcatgacgtagaacagattgggaaatacaagcgaattatcgaccaatatgagtttcgaaaagaaacgattttagaagttctacattctcatggtattaacatttcaaagttaaacgctgtttgtggacgtggtggattacttcgtccaatcgaaggcggtacgtatacagtaaacgatgcgatgttagaagatttaaaaaatgggtttagcggtcatcacgcttcaaaccttggaggcattttagcatatgaaattgcttctggattaaacattcctgcatttattgtggatcctgtcgttgtagatgagatggagccagttgctcgtataagtggtattgctggtatggaacgtaaaagtatcttccatgcattaaatcaaaaagcagttgctcgtaaagtagctgaacagttaaaccacaaatatgaggatttaaatttattagttacgcatatgggcggtggtattacagttggtgctcataaaaaaggaagagtaatcgatgtgaataacggtttaaacggagaaggaccatttagtccagagcgtgctggtacagtaccagtagggcaactagtagaaatgtgtttctctggtgagtattaccgagatgaaatgattaaaaagcttgtcggacaaggtggacttgtaagtttaatcggtacaaatgatgcgattaaagtagagaaaatggttgaaaaaggtgatcctgaagcaactcttatttataaagcaatggcatatcaagttgcaaaagagattggtggagctagcgctgtacttcacgggaaaatcgatgcaatcgtattaactggtggactggcatacagtaaaattcttgtcgatgaaataaaagagcgagtggactggattgcagatgttatcgtacatccaggcgaagatgagttagaagcgttagcagaaggagcacttcgtgtattacgtgaagaagaagctccaaaagaatacgttgtacgtgaaaaagaaacggtagctaggggttgagataatggcaaaagaatatgatttagtcatcgttggcggcggtactggtggatatgttgctgcaattcgtgcatcacaactagggttaaaaactgcactagtcgaaaaagaaaatcttggtggtacttgtttacacaaaggatgtattcctagtaaagctcttttacgtagtgcggaagtatatgcaactgctaaaaaaagcgaagagttcggagttattgcaagcaatgtagaactaaactttgcgaaagtacaagagcgtaaagagaagattgtaacgcagcttcataaaggcgttcaacatttaatgaaacaaggtaaaattgatgtgtttgaaggtattggccgtattcttggcccatctattttctctccgatgccagggacaatttcagttgaacttgcaagtggagaagagaatgaaatgttaattccaaaaaatgtacttattgcaacaggttctcgtccaaattcattaccaggtttagaattagacggagagtacgtaatgtcttcagatcatgccctaaaaatggaaacgcttcctagttcaattattatcgttggtggcggtgtaatcgggattgagtgggcatctatgcttgctgacttcggtgtagaagttacagtattagagtatgcaaaaacgatattaccactagaagatcaagatgtttcaaaagaaatgcaacgtctattcaagaaaaaaggtattaaagtggtaactggtgcaaaagtattaccagaaacattggtaaaagataatggagtaacaatccaagctgaacacaacggtgaaaataaagaatttaaagcagaaaaaatgcttgtatctgtaggaagacaagcgaatacgcaaaatattggcttagagaacacagatatcgttgtggaaaaaggatacattcaaacaaatgagttttatcaaacgaaagaatcgcatatttacgcaattggagatgtaatcggtggcctgcaacttgctcacgttgcttctcatgaaggaattgctgcagtagaacatattgcagggaaagaagttacaccaattgattactctatggtatcaaaatgcgtatatagcagtccagaagttgcttctgtcggtttaacagaacaagaagcgaaagaaaaaggctataagttaaaagtaggtaagttctcattccgcgcaatcggaaaagcacttgtatacggagaatcagatggtttcgtaaaacttgtagttgatgaagagacaaatgacattcttggtgttcatatgattggaccgcatgtaacagatatgatttctgaagcgggtcttgcaagagtacttgatgcaacaccttgggaagtagcacatacaattcatccgcatccatcattatctgaggcgattggtgaagcagcacttgctgtagatggaagagcgttacacgcataaaaatgtggatttaggaggttatgaaaaatggcagaagtaaaagaaaagcgccatgaagagcttggcttaagtgatgagcaagtattagaaatgttccgtacgatgttacttgcacgtaaaattgacgaacgtatgtggttattaaaccgcgctggtaaaattccattcgtaatttcttgtcaaggacaagaggctgcacaagttggagcggcgttcgctcttgatagagagaaagattatgcattaccatactaccgtgatatgggtgttgtactagcatttggtatgacagctaaagagcttatgttgtctgctttcgcgaaagctggagatccaaactctggtggtcgtcaaatgcctggtcacttcggtcaaaagaaaaatcgtattgttacaggttcatctccagtaacaacgcaagtaccacatgcagttggtattgcactagctggaaaaatggagaagaaagatttagtaacgttcgttacatttggagaaggttcttcaaaccaaggtgacttccatgaaggggcaaactttgctggtgtacacaaactacctgttatttttatgtgtgaaaataacaaatatgcaatctctattccagttgaaaaacaattagcatgtaaaaacgtatcagatcgtgcgattggttacggtatgcctggatatacaatagacggaaacgatccgcttgcagtatataaagctgtaaaagaagcagcagatcgcggtcgtcgtggtgaaggcccaactttaattgaaacagtatcatatcgtttaacagcacattctagtgacgatgatgatcgtgtttatcgtgataaagaagaagtagaagaagcaaagaaaaaagattcaattataacattcgcggcttatttaaaagaagctggtgtgttaactgaggaatcggaaaaacaaatgttagacgaaattatgcatatcgtaaatgaagcaacagaatatgcagaaaatgctccgtatgcagcacctgaagatgcattgaagcacgtatacgcagaataggggggaacgtttcatggctgtaatgtcttatattgatgctattacattagcaatgcgcgaagaaatggaacgcgatgagaaagtattcgttttaggagaagatgttggtaaaaaaggtggcgtgtttaaagcgacacacggtttgtatgatcaatttggtgaagatcgtgcgcttgatgcaccgcttgcagaatctgcaattgctggggtagcaattggtgcagcaatgtatggtatgcgtccaatcgctgaaatgcagtttgctgatttcatcatgccagcagtaaaccaaattgtttctgaggcagcaaaaattcgttatcgttctaataatgattggacttgtccagttacaatccgtgcaccatttggcgggggtgttcacggtgcattgtatcattcacaatctgtagaagcgatgtttgcaaaccaaccaggtttaaaaatcgttatcccttctacaccatatgatgcaaaaggcttattaaaagcagccattcgtgatgaagatccagtattattctttgaacataaacgtgcatatcgtttaattaaaggtgaagtaccggaggatgactacgtattaccaatcggaaaagcagatgtaaaacgtgaaggtgatgatattacagttatcacgtacggattatgtgttcattttgctcttcaagcggctgaaaagttagcacaagatggcatctctgcacacattcttgatttacgtactgtatatccattagataaagaagcaatcattgaagcagcttctaaaacaggtaaagttcttcttgtaacagaagacaataaagaaggaagcattatgagtgaagtggcagcaattatcgctgaaaactgtctatttgatttagatgcgccaatcgcacgtcttgcaggtccagacgttccagcaatgccatatgcaccaacaatggaaaaattctttatggtaaatccagataaagttgaaaaagcaatgcgtgaacttgcggaattttaatcggggggactatacatggctgtagaaaatattacaatgcctcagctcggggagagcgttacagagggcacaattagtaaatggctcgttaatgttggcgatcacgtaaataagtatgatccgcttgcagaagtaatgactgataaagtaaatgctgaagtaccatcttctttcacgggtgttgtgaaagagttaatcgctggtgaaggtgatacgttagctgtaggtgaagtagtttgtgttattcaagtagaaggcgcagatgaagtagcagcaacagctgttgaggaaaaaacaaaagaagaatcaaaggcagaaatagctacgtctgaaaaagcaccgaaagtaaagcaaccaactgatggaaaaccacgtttttcaccagctgtgttaaagcttgcgggtgagcataacgttgatttagatctagtagaaggtacgggagcaaacggccgtatcactcgtaaagatattttaaagcttgtggaatctggaaatatcccacaagcaggtgcggcgaagaaagaggaagctgtagcggcagtagtagaagctcgcccagaagcaccaaaagcagcaccagtagcgcaaaaagtagaagctgcgaaaccagtttctgtacctacaatgcctggagatattgaaattccagtaacaggtgtgcgtaaagcaatcgcagcaaacatgctacgtagtaaacacgaagcaccacatgcttggatgatgattgaagtagatgtgacaaaccttgtgtcataccgtaactcaattaaaggtgactttaagaagcgtgaaggctttaacttaacgttctttgctttcttcgtaaaagcagtagcacaagcgttaaaagagtatcctcaaattaattcaatgtgggctggcgataaaattgttcagaagaaagatattaacctttctatcgctgttgcaacagaggaagaactatttgtaccagtaattaagcaagcggacgagaaaacaattaaaggtattgctcgtgaaattacagaacttgcaggaaaagtacgtacgaaatcgttaaaagcagacgaaatgcaaggtggaacatttacaattaataacacaggatcattcggttctgttcaatctatgggtattattaattacccgcaagcggctattttacaagttgaatcaattgtaaaacgcccagtaattatggataacggtatgttcggtgctcgtgatatggttaacttatgtttatcacttgatcaccgagtacttgatggtttaatttgtggtaagttcttaggacgtgttaaagaaattttagaaaacatgtcagaaaataatacatctgtatattaataaaaagctcgcttatgcgagctttttattatcttatttcttcatctacatcctactatatgtataaatatctttcccagtaatcttacaataaacgattatgtattaggaatttacgaaaatacattgctgatatatggtatatggatataaaataagaaaagaataatttttttggcaaatcttactgacgaaactgtagtataatatattgtattgtatgaaaaagagagttattctatataagtgttttatagataatgtgtaatcagtcgtcaaaacatgaagaatgttgactcctggttttttatttttgccgtaacaatgtttcaggaggatgtcatgaaaagaagtaccgagtttctaaaaagtttagatgtaaaattaattttaattttgtgtgcactatgtgtgacgagtatagctgctatatatagcagtcagcaaacgggacagtatggagctgcaaactttgctatgaaacaaggtgttaactacataattggggttgtattgttacttcttgttgcaagcatcgacttagatcaattgcaaaaattatcttggccgctttatattgctgggtttgcttcacttattcttttgaaagtattaccaccatcaggttttacacctgaaaaattaggtgcaaaaagatggtttgttttcccagtatttggacaaattcagccgtctgagtttttcaaaattgcattgctacttgtagtagcgagtatagcagtgaaacataatgcacagtatatggcaaggacattccaaacagatttaaagctagtaggtaaaattatgctagtgtcacttccacctatggcggttgtatatagtcaacctgatacaggtatggtgttcttatatgctgctgctattgcatgtattttatttatgtcaggtattcaaaagaaattgatagcattatgtacagttattccgttgaccatattatctgctttaatatttattttctttaagtatcaagattttttctataataatttagttactttactaaagcctcaccaacagtcgcgtattgtaggttggttaaatccatttgaaaatgcagatcaaggttatcaaacacagcaatcgattttagctgtaggtagtggaggaatggaaggtaaagggtttgggggaggaagcgtctatattcccgagaagcatactgactttattttcgctacaattgccgaagaaggtggatttatcgtagcagccttagttgtcttcttgttcctattactactatatcgaacaattattattggttattccgctgataatttatttggtacattattatgcgctggatcaatcggtatattaacagttcaaatattccaaaacatcggtatgatcgttggattaatgcctgtaaaaggtattgcattacctttcttatcgtatgggggaagttccttattctcaaatatgattatgatggggctcatattatcggtacggaaaacttataaaaaatatatgttttcagttaagtaaaaaaagctggttcgtttttaaacgaaccagctttttttacatatatgctcataaacgttgcaaactaaaacaggatagcagtttgagacgggtaaggagtgcaaagtgatgcatatgcatatttttgaaggagcacggcatctttctaatagtgaatgggttattcgggctattatagcatacatatttttaatattagttgcgaaagcgatggggcaaaggtctatcgcacaacttcgttttttagatgttgtattagtgttattgcttggtgggaatatttctaactcattgtctgatgaaaaagtagggttactgggatcgatgattacaacgttcatacttgttgtacttcatattataagctcagttttaatgctgaaatgggatagatggagacgttttttagagccagcacctattattcttatacataatggttccattgattttagcaatttgaaaaaggcgagaattaacgtggaatatttgttttcggaacttcgtatgcgaaatgtgagcgatattcaaacgattaaattagcattatgggaagcgaacggtgtcgtttctatatttcggtatccagaatatgaagcagtttcgcggcttgatcttaaagtggcgggaaaaaaatctccagtttcttttgtattagtaaaggatgggaggatacagaaagatgttcttgcattattaggaaaaacagaagcgtgggcgagagaatttctagaggagagtacagaagtcgaatctattatgttagctacagtagatgaatcacataaaataaatattttgttaaaaaaatgaaaaatatacgcattttgtcgtttcgtacatatgatacaatagtgtggacaacgaaaaaggaggcgatacggtgggatatgtagaagaattacgaaaaatagttggtcatcgccctttaattttagttggtgctgttgtactcgttataaatgaaaatggatatgttttattgcagcagcggacagagccgtacggaaaatgggggctacctggcgggctaatggagcttagtgaatcaccagaagaaacagcttatcgtgaagtatatgaagagacaggaataaaagtgaagaacttgcgactaatcaatgtattttctggagcgaactactttacaaaattagaaaacggtgatgaatttcaatctgtaacaaccgcctattatacggatgaatacgaaggggattttgttatgaataaagaagaagcagttcagcttaaatttttttcagtaacagaactacctgactatattgtaggatcgcataaaaaaatgattgctgaatatatgaagattatggaaaaaaagatataataatagtgaaagaaatacaaaaacacagctctggttggtagtccagacgcatgatttcatgtcagtaaccttcccctccgggatgtcccgtatttctaatcttttaaaggaggggctgtcaatggatttgacagtatatcacgatggccaattttttgttggaatcattacatgtaaagaaaaagggaaattgtatggagcgaggtatatttttgggtcggaactgtcagatgaagaagtgcttatgtttgtgaatggttcacttttagagcattttcagcactttgcaaaatgtggtgtagaagttaaagaaaaacagcgtcctaaaaacataaagcgtatcatacgacaagcagcaaaagaaacaaatgttaaacgttttactaaggcgcaagaggcaattagtttatcttatgaattgcataaacaagaaaagaaagtgcagtctaaagagaagcgagaagctgaaaaagaaagaagacgtttaatgaaagtactaaaagcaaagcaaaaacatcgtggtcattaaagaaaaggtgttagagcaagagctctaacaccttttctatacttaaatacaagtaaacttacttgtatttcataaacattaactggtaagatacaaataggtagttttagaggagggaaaagagtgattaattttaacttttttatgaatgatgttgtccgccaagcgcgtgaagaaattgtctctgctggatatacagaattgacgacgccggaagcggtagaagaagcgtttaaaagaaatggaacaacacttgtaatggtaaactctgtatgtggttgtgcaggtggtattgctcgtcctgctgctgcgcattccgtacattatgataaacgtcctaaccaccttgtaacggtgtttgcaggtcaagataaagaagcgacagcaagagcgcgtgaatatttcgaagggtacccaccttcttctccatcatttgctttattaaaagatggaaaaattgtaacgatggtagagcgtcatgaaattgaaggtcatgaaccgatgcaagttattgcaaaactacaatcgtatttcgaagagaattgtgaagaactataaaaaataagagaaaaggcggcacatccacaatcaagtggatgtgccgccttttttatttattattaaaattcatgagataatagttatgttattttatgcattattttatacataataagcagtgtttgtattgcttttttatttatttttattttatatattgcataaaaataaaagtgctgatacaatacaaacatcgaataaatattctattaaacttttaaatatacattattagggggaagaaagatgaagaagttagtatcaatatcgtttgcacttattttaattgtaagtatattcagcgcttgtagtaatggggaagaaaaggcaactggaaaaagtgaaaaagtactggttatggggacttcagcggattataaaccatatgaatacgtggaagcttcaaaaagtgatgaaattattggttttgatgttgatgttgctaaatatatcggaaaagaacttgggtatgaagtgaaagtgaaagatatggattttggtggtttattagcatctcttagttcaggaaaagttgatttcgtaatggcaggcatgacgccaactgcagagcgtaaaaataatgttaattttacagatatttattttgttgcgaaaaatatggtcatttctaaaaaggattctaacattaaatctgtagaggatttaaaagggaaaaaagtaggagtacaaacagggtctattcaggaagagaaagcagcagaatttaaaaaacaagtagatttccaagttgagggacgtgaccgtataccagaaatcgtacaggaaattaaagctggtcgttttgatgctgcaattatagaagacacagttgctaaaaattatttagagaaaatgaaagatttacaaggaattgaaattaaagaagcaccagaagaagttggagcagcaattgcccttccgaaaaacagtgataaaacagctgaatttaataaagtaattaaaaaaatgcaagaaaatggagaaatggataaattagtgaagaaatggtttggcagcggaaaataagctgcctttcacttttctgtgaggggaatgaaaagaatgaacttagatttttcggcgattacgccttcgataccatatatactaaaaggtttagaagttactttgaaaattgtagcagtatcagctttagcaggatttattttaggaacgctattagcactttgtaaaattgctagaatacgagcattaaatatagcagcagatttttatacatcaatttttcgtggtacaccccttgtattgcaattaatgattatttatttcggcgtcccacaaataattggttatgaaataccagcattcttagctgctgtacttgcatttagcttgaattcaggtgcatacatgtcagaagtaattcgtgctggtattcaagcggttgataaaggacaaacagaagcagcaatggctttagggataccgtacggaaaaatgatgagaaatattattttccctcaagcattaaaaaatatattaccagcgcttgtgaacgaatttgcgacacttacgaaagaatcggctgtagtaacagtaataggcgcgactgatttaatgcgtcgtgcttacattgtaggcggtgagacatttaaatatcttgaaccattactttttgttggactgatttattatatgttagtcattattcttacattagtcgggaaggcaattgaagggagaatgaagaaaagtgattaaaattgaaaaccttcataaatcatttggtaaaaacgaagtattaaaaggaattacaacaacgattgaaaaaggggaagtagttgcaattatagggccttctggatcaggaaaatcaacatttttacgttgtatgaatatgttagaagcaccaacgaatggtcacatttggattggaacggaagaagtaacgaatccgaaaacgaatgttatgcatgttcgtgaaaatgtcggtatggtatttcagcattttcacttatttcctcatatgactgtattagaaaatattacgtatgctcctatcaatgtaaaaggggtaacgaagcaagaagctgaaaagaaagctgagaaacttttaaaaaaggttggattagtagataaaaaagatacgtatccaaatcgtctttcgggaggacaaaagcaacgtgtagcaattgcaagagcgttagcgatggaaccggaagttatgttatttgatgaaccgacatcggcgctagatccagagatggtgaaagaagtgttagaagttatgaaatcgttagttacgacaggaatgacgatggctatcgttacacatgaaatgggttttgcaaaagaagtggcagatcgtgttattttcttggacggaggaaagcttgtagaagatagtgcgccagaagaattttttgcagcgccgaaaagtgaacgtgcgcgacaatttttacaaaaaatattgtaatatgaaaaggttatgtgaataataagtagaaaaggatgacattgtgtcatccttttcttatactagctgtaaatacgtttatacatataggagtaatgatatgtttaaaattggatatcgtacagtaaaaacagcaatagggacaggtgcggcagtttttattgctcagttattagggttagaattttatagttcagcaggtattttagttattttatgtgtacaaaatacgaagcgcaaatcacttcaagtgtcgttacatcgttttctagcgtgtgtattatcaatggcattcgcgttttgtatttttgaaacgattggctatacaccacttgcaattagcatattgttacttacatttattccgactgcagtaatgcttaaaattcaagaaggtattgtcacgagttcagttattgttatgcatctatattcattgaagcaaattacatggcttatagttggaaatgaaattgctatattaacgatagggattagcgtggcgttattagtaaatatgtatatgccgagtagtgaaaataagctaaaagagtaccaggataaaatagagagtaattttaaaacgattttgtttgaaatggttgtgtatttacgaaatcgagaaagtagttggagtggagcagaactcattgaaaccgagaatatgttaaatgaagcaagagatttatcgtttaaaaaacttgagaatgcatttatgcgagaagatgattattactatcgttattttaatatgcgtatgcaacaattcgaaattttagagcgaatgataccactagcagcttctttatcgtggacatatgaacaagctgacatgattgcagatgttgttgaaaacattggtaatgctattagccctgaaagtactggcgttatttccttaaggcagcttcaagaaatgagggaattatttagagacatgccattgccagctacacgcgaagaatttgagatacgtgcgaaacttgttcaacttgtgtatgaaatggaacaatatttactcattaaaagtcgctttaagggaaaggataatataaaagaacttatatagaaggtaggaattatctatgccgtatcttctctctatcatattatgtctttctttatcaccgatttggcctcttggggataatccacgtgccggagatccttttattattgtaaataaagcaacgaataaattagcttacattgacgatggaaagattcaaaaggtttttccagtagcgacagggaaaacgaatgaattaactccagaaggaacttttgatgttgtaatgaaagcaaaggatccgtattacattgcgaaggatattccaggtggatcgccaaaaaatccacttgggtcaaggtggattggatttaatgcaagaggaactgatggaagtaaatatggaatacatgggacaaaccaaccgagttcaattggaaagtatatttcacaagggtgtataagaatgaagaaaaacgatgtggaatatttgtttgatcgcattccaattggaacgaaagtatggattgtgaaatcgaaaaaatcatttcagcaattggcaaaagaaaaaggagccgtcgcatatgaaaaagccaacgaaaagggtggctttttctattataataagttgtcttgacatgtgtacataaccgtgcgttaatgagagtatagaaagataaagttagataaaggggttgctcatatgtacttgaatccaaaactttcgtatatgcagttttttatgggatttctatttgttattacattcatattggcaacttttaatatatgttcttatcttgtagcgattgtatgtatggcattacttaatctcacttttgttattggggcatttcagcagaaacaatatacaagttttgtaatagcgcttgtaatgtcattttcctttagtattgtagcgattgtgttttatataaaataaaccatctcgatgtcgagatggtttattttgttatgtgtaaaaagtaaaaaaaggacgaacacatcgccctttttaccaaaacatactcgcgccagcaagtaatgttgttacaagcatagaaattagcatcacataaaccataactttttgagcttttttatgcatcgttatacctccttgcaaatcagtacaatttcattgtaacgagaaatgaaattatggacaaggggagagtgaggacaaaattcgggaggggattgcaaaatataacaggaaatttgagagtgtgtagagaatatagtaaaagggtatattgttaatttttagttgggcaagctgaagaatggagatacgatgatgaaaatatacgaaacagatcgtttatacttaagggaaattgatgagtcgtatgctgaaacagttcttcaatattacgacagaaatcgtgaatttttaaaagcttgggaagagtatagaccggatgatttttttacgctagattatcaaaagaaaaagttgcaaaaggatagaaaagagttcgaagaagggaaaatcatcagactatggatttttaaaaagggtgatgatacgaaaataattgggtgtatttcatttaatttaatcgttcgtggcatttatcaatcttgtgtactcagttataaattagataaagcagagttaaacaaagggtatacgacagaagcgcttagaaaagcaattcaagttgcttttggggaatttcagttacatcgtatagaagctccgattatgcctcgtaatttagcatctatacaagtagtaacgaagataggttttcaatatgaaggcgtatctaggaagatgttaatggtaaatggcgtgtgggaagatcatatgcgctgggtattgttaaatgagtaatagaaagcagatggttatctagacatgtaaaccatctgttttttgtcttgtatttcgaaacttttgcgaaattctgttataattaatagtgttacatacataatggtagtgcaggaggcgcagtcttatgattaatcaagaacgtttagtaaatgaatttatggaattagtacaagtagattctgaaacgaaatttgaagcagaaatctgcaaagtattaacgaagaaatttacagatttaggtgtagaagtatttgaagatgacacaatggctgtaactggtcatggtgcaggtaacttaatttgtactttaccagcaacaaaagatggtgttgatacaatttactttacttctcatatggatacagtagttcctggtaatggaattaagccttctattaaagatggatatatcgtatcagatggtacaacaattttaggtgcggatgataaagctggattagcatcaatgttcgaagcaatccgtgttttaaaagagaaaaatatccctcatggtaaaattgaatttattattacagtcggagaagaatcaggtcttgttggtgcaaaagcattagaccgtgagcgtattacagcgaaatatggctacgcattagatagcgatggaaaagttggtgaaatcgttgttgcagctccaacacaagcgaaagtgaacgcaattattcgcgggaaaacagctcacgctggtgtagcgccggagaaaggtgtatctgcaattactatcgcagcgaaagcaattgcgaagatgccacttggtcgcattgactctgaaacgactgcaaatattggacgttttgaaggtggtacacaaacgaatatcgtttgcgatcatgtacaaatctttgcagaagctcgttctttaatcaatgagaaaatggaagcacaagttgcgaaaatgaaagaagcatttgaaacaactgcaaaagaaatgggcgggcatgcagacgttgaagtaaacgttatgtacccaggatttaaatttgctgatggtgatcatgttgtagaagttgcaaaacgtgcagctgaaaaaattggtcgtacaccttctcttcaccaaagtggtggcggaagtgatgcaaacgtaattgcaggacatggtatcccaacagttaacttagcagttggttatgaagaaattcatacaacaaacgagaagattcctgttgaagaattagcaaaaacagcagaattagttgttgcaattattgaagaagtagcgaagtaatggaatagaaaaagcgtgtaaatcaattgtgatttacacgctttttattttgattcgattgctttgacaagacgtataagccaatataagaaaacctatggaagtatatacgttgttgctacatgtactagacgaaggaataatcctaacgtattcatattgaaaatcggaagtagtaaataattaattgcaatgattaatataactacaaggaatgtataattgagtttatcccgctatttgccggacagtaagccccccacctcaaaattcagcgaaagtaaagaatttaggtgagggctgattaaagtttcactttattagttgatctcatcataatcagaccctttcacatatatatcctctttatatcgattataaaaagaacaagtaattattataactattgtgcaaaatttgatataatgaaagaacgaacgttctgattagggagtgagtactatgcgagaaatgtatccgaaaaatggtcgtgttattttacatgtagatatgaattgctttttcgcatctgttgaaattgctcatgatccatcattacaaggaaagccattagcggttgctggaaatgaaaaagagagaaaaggaattattataacatgtagttatgaggcgagagaatacggaatacgtacgacgatgcccctttgggaagcgaaaaggttatgcccgcaattagttgtaaggcgtcctaatttcacattatatcgcgaagcttcatttcaaatgtttcaagtcctttcccgttttacagaaaagatacaaccagtctcaatagatgaaggatatttagatattacagattgctacgcactcggttcgcctcttgaaatagcaaagatgattcaacaagcactattaacagagttgcagcttccgtgtagtatcggaatcgctccaaatcttttcctagcaaaaacagcttctgatatgaaaaaacctctcggtattaccgtacttcgaaaacgtgatattccagaaatgatttggccacttccagttgaagcaatgcatgggattggagaaaaaacagctgaaaaattaaatgaaattcatatacatacaattgaacagttagcgaagggagacgagcatatcattcgcgctaaaattgggaagcatggtattgatttacaaaagcgtgcaaaaggtatggatgatagggaagtggatccgagtcaaatgggccaacataaaagtgtcggtaactcgatgactttttcaaaggatatggatgaagagaaagaattgcttgatatgttagaacggttatcaaaatcagtgagtaaaagattacaaaagcgaacccttgtcagctataatattcaaattatgattaaataccatgataggcgaacagtaacacggagtaagcaattgaaaaatgcaatttgggaagaacgcgatatttttcaagcagcatcccgtttatggaagcaacattgggatggtgattccattcgtttactaggtgttacagctactgaaatagagtggaagacagaatcggtgaaacaattagatttgttttcatttgaagaggatgcgaaaaaagaaccactacttgctgtcattgatcaaattaacgataagtatggaacaccgattttacaacgaggtagtcaactactacgtaagcaagagaagtcgtttcaacaaaagttagaaaataagtttatgtagaaggtgtcatgaagtagtaaaatcatgacacctttcctgtttaactcgcttctaaatttaaagaagtcttccatccagctccagtaacgccagactctaatagcattctacttactattttttcaattaagatagccgcatttgtcttgcaatgtaatgtagcctgtatacaaactttttgattagaatctacatcttcactatacaattcttttaaaccgagcccttctgtacttaccatatgcataagtaaaaaacgaatatgtgcttcattttcttctgaacaagtaagggaaagtaagtagttcgtttgttctggtgattcttcttttgattttttattcataaaaagagcaattgggcgaagaagtatatttgctagtaacacgccagctgcacctaatatagctgcaacgaggaaaccggcgcctgtaagagtaccgacagcagctgcacaccataaagtagctgccgtatttagccctctaatactaaaaccatcgcggataataacgccaccccctaaaaagccaatgccactaacgacttgagcagcaatgcgggatgggctagcatcatgatcaagcatgacggataataaaacaaatatacaggcaccaagtgatacgagagcatttgtccgtaacccagccattcggtgtctccattgtctttccattccaatgcaagctcctacaataattgcgataactaatctgaatacaatgtcgtaccataccatcatggtcacctccatatataatatgtgttatgtcttttagaatgagcggggaatacccactcattcttatttttacaaccagctatgaaactttttaatataaagctttttcaggaattgtgttaaaaaagcgtagcctaatagtattcctactaaccaagggaagtagttaagtggcaatgcttgtaaaccaacggctgcaccaagtggtgagaatggaatataaatcccgattgccataataagagcggttaataaaacgactggtgttgatgcagtgctttgaataaatggaatcttttgtgttcttatcatgtgaacaattaaagtttgtgttaacaatccaacgacaaaccaaccggactggaataatgattgctcgctcggtgtatttgcaccaaatacattccacatgactacgtatgtgataatatcaaatatggaactaattgggccgatacaaataatgaagtttcgtaagtttgcagtatcccattttcgtggtttttctagaaactctttatccattttgtcccatggaatagaaagttgtgaaatatcataaagtaagttttgaattaaaagatgaatggcaagcatcggtaaaaaaggaatgaaagcacttgctactaacacactaaacacattaccgaagttagagctagctgtcatcttaatatattttaaaatatttccgaatgtagtacgtccttctaaaatcccggcttctaatatagttaaacttttttcgagtagaataatatcggaagcttctttcgcaatatcagtagcagtatcaacagatattccgacatcagcttcacgtaatgctacggcatcgttaatgccgtctcccatgtaacctacagtgtgtccatttccttgtaatgcgtgtataatacgagatttttgcattggattaagcttcgcaaatacagtcgtttcttcagcaagttttgctaatgctttatctggtaaagaatcaatctcgtaaccgaggattggttcgccgatatctaatccaacttctttacaaacctttcttgtaacaatttcgttatcgccagttaaaattttcacttgtacaccatgtttttgtaatgcttgaattgcagctgctgcagatggtttcggtggatctaaaaagccgatatatccagcgagaatcatatcagtttcgtcttttactgcgtactctttatcatttattcttctatcttttttataagccacagcaataacccgcataccttcactatttagtgtctcacttagttttttgacatttgaacgtatttcctcggtgagtgggacgattttttcatccacttcagtgtagttacaaattgataaaatttcttctacggcacctttacaaaccattgtatgttcacctgaactatcctttacgatgactgacatacgtcggcgggcgaaatcgaatggaatttcatctagcttttgaaaagctaatggattaaatttattgttttcctctgtatgcttaataacagctttatctattaaatttttcaatccagtttgatagaaactatttaaataggcaaattgcaagacgcgattgcattcattccccttgggatctaagtgacgaacaaggaccactttatcttctgttaaagttccggttttatctgtacaaagaatgttcatagcacctaagttttgaatagaatttagctgttttacaattactttttgtttagacatgttaacggcacccttagctaaattagcagttacaatcattggtaacatttcaggtgtaaggccaacagcgacggcaatagcgaagaagaaagcttcttgccaatctccttttgtgaatccattaatgagaaggacaataggtgccataataagcatgaatgtaattaagagccagcttactttgtttacacctttatcaaagcttgtttctacacgctttccgattaccttatttgctaaagagccgaaatacgtatcggtacttgttgagatgacaacagctttcgcgctgccacttacaatatttgttcccatgaaacaaaggttttccatatcgagtggattgtaattttttttcatgtttgtcggtaagatatgcttattttctgtatgatagcagtgttcgtatttttctacagggagtgcttcccctgttaaagaagattgattaacaaataaatctttagcggatacaatacgcacatcagctggaacgatatcaccggctgaaagggaaataatatcgccaggtacaagttcctcaattggaatttctgttgtgtaatttcgatttaaattcgttacattttttgtttcatgtacaaatccatttattctaaatacgctcgcagttgttcgaaccatagcttttaacttatcggcagctttttgagaacgaaattcttgggaaaaccgaattgttgcactaagtaggaccattgcagatacgacaattgttccttgtatgtcatctgtgaaaaaggaaagggctccaagagctaataaaacgaaaataaatggatttttaaatgccagcagaaattgaatgtaccacggcgccattttattatgagctatttcgttcggaccgtataaagaaagtctacgagacgcttcttgtttagataatccatcttgtgttgtttctagaagttttaacgcagagcttacatcatgtgttgcaacctccactaataattcgttatttgtttgcatgctatcttgctcataagcatgctttgtttcttgtctttgtaaattaaacatcagtagttcctcctctgtcatgaaagaggaaacaatctgttacctaactatttgaaatggtgaggaacagtttctttcctacctacatgatgaaatatgaatgtaaaacgtatgggtatctgggccgaatcatcaattgccaactgttcctcacctccgtacaatttagtagtttctgaatatgctatgtttgtttcatagtaaggtgcatatatacgtaaaaagacctttactcaaaacgagtaaaggtctgaattcgcagttaaaagagtctacaacaaagactgttagtaaacataaataaaaacagtttttgtgtatgacaaaatacatgcacctctccctcgttgagttttagcactgtatagcataggtactgaaaccagctacgttaaaaaaggccttcattccgacctttcctgttgacccattggcgtctctcgacatttttgggcagcagcgtttctctatacaggagcctcacctaacagagaccatattcaattacatgttgatgttagcactgtaaaatcgtagtgtcaatatcttttttatctgtgtttttaaaatattaaatggatttataatagatatatgggatgaaatgcatgatattgattataaataatatggaaaataaatatttttataaaaggggaatttgtaatggtaccacaaaattttattataaatattgagaatcaaaaatggttgtttaatgagcaggaagatttatgttctcatggagaaatatatttaaatatggctggaaccattattacgcaggcaggtatggatgaggaatggggaataagtgaatcagctttagctttgttacgaactttagataaagaatatatttgtgatattaaaaatgaagaggggcttattttgcacggatgtggcactatgctaatgttaggatgcccaatttcaattcattggactataaaccatataagtaaaaacgtgattttaaaggactttgtcaaagttatttctactgatcaaaaggctatatactatgaagggcttcatatagaattgaatgaaaatgaatatagaagacaaattgtttcttttgcattacaagcaaaagaattatttaataaatcaagtgacaagataattttagatgagtttgatcaaaggatgtatacaaacttttggacggaatatgacgatttactaaataagtataaataaaaaagcactgtaaccagtgcttttttatttatagattacgagattgtagggttttcaaaaataacaatctctgaactgtttgtagttgaaacacgttgggcgtaatatgttaaagctgaagaaatatatgctggtaacgtatcatttgtatgtgatgttgtatattcatggattaattcctttaaagttgtccattctaattgtgctgggtgatcagacacgaaagaacttacccagcgatcaaatgaagatgaaaaatcagtttgtaaacgaaatacttctttcataataaaacgctccctcgtatagtatgtttaaacttaatttttttactttcatgagagacctgtaaaatgtgttgaataagtttgttccccgattttatgtgtttcaatcgttccaatctctagtaccttttcaattgcttctcttgtcatagtcattttttatttccccttttcttaattagatttacttttcatataatcgattactaccgtttgcttttcagcaacctgattttgttccttctcttctacttcttctacaggttgtccaacatctgttttcacatcaccctgtagatccatataaaactgtccctggatcccggaagctaactcttgaccaactaaatttccgttttgatccatatctaatagaatcttagattctaccgcttctgttggcgctagtttcgaagtggcttgaacttgacaattccatacatcacgctttttatcaccagcaaacgaaagtgttaaaacaatctttcttgcttttttaggatcagtatttaaatctgccatattttccattacacgctcaaactcttgatgaaatctttcagcaagtgctccatcagcaaatgtatttaaatcaatcatgacttccattatttctctcacctaatccttccttcttaaaattcaacatctacttgaatatcaatgttcataggtatttcttgcgttacacgaattgattttggacttacacctttttgaatcaactttttaacttcttcttttgcagcttcttttgtgtgaaactcactgatacctggaaaacctgcgaaattactagtaatcactaaaatcttttgttgcatgtttgctcctcctactgaacttccgccatatttatttgtgcatttgtagctgtaatttcttcttctaaaataattggaagtgaatattcttcattaatgatttgaatcgctctatctaaatgatgacgtttaatagctttataactactaatcccaaactctctatgtaattgactataaatatcgctatacactttttttctaaggctaacatccctataagcattagattccttaccacctaatagaagaacacctaactttcttacaacctttgatacttcatcacattcgatagcatataaaggggcgttttctcgtaaatccttcacatcggatttaatctcctgaatttcctgggtatgtccttctaaagcttgaaacgttaactttaaaactcccattggatctgtaggtattttttgttgattttgtatatgttgcttcattcgtttaaactcttcaataaacttgattttcatttgaacagcttcttttgtgttataactcattacaactaatgtaaaagcttcttctgtcagatcgattttaggataacgacgccctctattttcataagttcgctccttaaaattcaggagtgaaaattcataacctgcatactccatttgagttctgatatcagccataacattgtcatgacgtttattgaatacttccgcaatcttcaagctatctgtaacaacttttccgttgttttcaaatactagtgcttgttcgtttgctactgttaattgatccatattactttcctcctctacaaactcggaataactttagttttatccgtattacgatgtaccaaatgcaattcattacttacttttttaaaaatcaaccaattatcaggattcaaattgtatgatttaatatgaaccttttctttttttgttggctttttaccatttttcaattaactcacttcccttttgctcatgtcctttaatttgcagaaccaatatttatcgtcaaatttcgcgaatatgttaaaaaaattatttactttcattttttatatttcgttgttccacttttctttgaatgattaactctcgtgcagctggtattagcggtgttaaaaattccttccactgttcccttgtaaggattactttcaccacatacccattttcatcacgaataatttgtcccccactcatcctcaatcacctcaatgcatctatatgtttgtgggacactaggactatccatttaaatcaaaatttcatgaaacaatattcttcaaattattcgctctctcttgaacgcgttttttcataagtacgaatttttcgtacttaggtccaaaaaatatatcctcataaggaacatcaaataagtacatgtactttttgattaattcatctggaatgtttgttgaatcttgttcatataaccatagggtttttggggatacttctaatatatccgcaagttctgcttgattgaaccctgcactttctctaagttcattcaatgttcttttcaagtaatccattttgttacccccttccttcaatatttattgtattactaaatttatgtaatttcaatacaaaagtacgaaaaaatcatacaaaacgaacactttacgaataattcgtaatgtgttatattaaaaatgtagttacaataggaggtgacggtatgactgatttacaaaaacaaactatagtaaaaaacataaagaaatttttaaaagaaaatgatatgactcaatcggatctagctagtcaaataggaatcgcaagaagtaccttaagcgattatatgaattacagagccaaaccaagttcaggggttttagaaaaaatggctactgtgtttggagtgacaaaatctgatattgatacaacttataagaattcaaaagttgaaattgtagatggagaactccaattagttcaagaaaaacctactgacaatgaatcaaaaaaggaaatccctattattggtaaaatcgcagctggcgttccattggaagctgtacaagatatagttgatagaattgcacctccatacaaaactcacaatatcgatgaattattcggacttgttgttaacggtgaatccatgaataaaattgtccctaacggccattacgccgtactaaaaaaacaacctgatgtccaaaatggagaaatagcagctgtaattgttaatggacattacgcaactttaaaaaaggtgtataaatttacagatttaatgattttagaaccttgttcacatgatgaaagttttaaggaccaacaatactcacaagataactgcgaggatataaagattataggaaagtttttatacagcgtaagtccaatcattcaataattaggcggtgaaaaggtgtatgtagtcggcaagtgtcgactgaatgaaatattgaaagaaaagaaattaactcaagtagatttagcactgaaacttggcatggctaaacaacaaatacattcttacgcaaacaatgacagggttatgtcttatcagaccgctaaaaacgttgcttctcaactcaatattaatatggaagatttatacgaattcattcagtcggaaaaacagtgagtttttctcactgcacctgaaagtcaactacttgattgacctcaattcataatgcaccttattgaaacttatattttcacatagtattcgtctaataaattaaaaatatacataaaatattgattaagaaaggggtttagttaatgaaatgtgtcatttatagacgtgtatcaactgacatgcaagttgaagaggggatttcattagatatgcaaaaacttcgtcttgaacaatacgccaaatcgcaagattggatagtggtaaatgattactgcgatgaaggatatagcgccaaaaatacagaacgacctgcttttcaacaaatgataagagatatgaagaaaaaacaatttgatattattcttgtttacagattagatcgctttactcgttccgtttcagacttacattcaattctaaaaataatggatgaatataatgttaaattcaaaagtagtacagaaatatttgatacaacaaccgctactggaagaatgtttattaccttagttgcaacacttgcacaatgggaacgagaaacaacagccgaacgtgtacgagactccatgcataaaaaggctgaattagggctgagaaatggagctaaagcacctatgggatataacctaaagaaaggcaacctatatatcaatcatactgaagcagaaattgtaaaatacatattcgaaatgtataaaacaaaaggtgtagtaagtattgtgaaatctttaaacagtcgtggtgttaaaactaaacaagggaaaatatttaattatgatgcagtacgttatatcataaataatccaatttatattgggaaaattcgatggggagaggatattctaacagatattgcccaagaggattttgaaacttttatcaataaagacacttggtataccgtccaacaaatacaagatagtagaaaggtaggaaaagttagattgcaaaattttttcgtattctctaatgttctaaaatgtgcaagatgcggaaaacactttttaggaaatagacaggtaaggtctcataacagaattgctgtgggttatcggtgcagctcaagacatcatcaaggaatatgtgatatgcctcaagttccagaaaatatacttgaaaaagaatttctaaaccttttagaagatgcagtcgttgagctggacgcttctgatgaaaaaccagtagagttgagtaatttacaagaacaatataatagaattcaggataaaaaagcacgtctaaaatttctattcatagaaggtgatatccctaaaaaggaatataaaaaagatatgctaacactaaatcaagaagaaaacataattcaaaagcaactcgctaatataactgacactgtatcttcaattgaaataaaagaacttttaaatcaattgaaagatgaatggaacaatttaaacaacgaatctaagaaagcagcagtaaatgcaattatatcttctattacagttgatataataaaacctgctcgtgcgggtaagaatccaattccacctgtaatcaaagttatggatttcaaattaaaataaacacaacctaactgcatttatttaatgtagttaggttgtgtttaattgaccaaaccatggtgtttgaaatgcactgccgccagactgaatcaatccgctcaactgctctttatcaaacagttcgtgtaaaatcgaacctttatccgttaatagattttgaagccatactgttactgcgtttgtatagtgtggattgtgcgttttcggatacggactcttctttctatataagatgtcatgcggaagtacatcttctaacgctttacgtaatagacctttttcgcggtttttatacattttcatttcccaaggaatattccacgcatattcgacaagacgatgatctgcaaatggaacacgtacttctaaacttgcccccatactcatgcggtcttttctgtctaataatgtggtcataaaccataccatatttaaataaaataattggcgtctttttgcttctagcggactttccccctctaaaataggaacttcttgaatcgactcttcataacgcctttgtacatattgttgtaaatttaatttatttctccattctttttttagaagttgttcacgtgcctctgtagaacgcatccatggaaatgcactcgattgtaaatcatcttctctataaaaccacggatatccaccaaatatttcatctgcacattctccagataagccaacgacaaaatcttgtttaatttctcggcaaaaccataataatgacgaatcgatatctgccataccaggcaaatcacgaacaagtactgcttcagttaaatactctgctaatttttcattcgaaatgacgcagcgatgatgggttgtttgaaatgtctcagtcattaaattaataaacggagcatctgaatttggctggaatgcatttgctttaaagtatttgtcattatcttcgtaatcaatagaatacgtgtgtaattgcccttttcccgatctctcatattctttcgctgcaatagctgtaatagcgctcgaatctacaccacctgataaaaaagtacatagtggtacatcagaaacaagctgtcttgtaatagcatcttgtaataaaaagcgcgttttctctactgtttcttcaaaagagtcttcatgttttttactttccacattccaatatctccatatacataaaccgttctttgaaaatgtcatcgcatgacctggacgtaattcttttataccagcataaataccgtggccaggcgttcttgacggtccgagtccgaatatttctgataacccttctaatgttacttccgccttcacatctggatgcgacaatatcgcttttaactccgaaccaaataataagcgtccgctatcatatttataaaaaagtggctttacacctaatcgatctctcgcaataaatacttgttctttctgttcgtcccatactgcaaacgcatatataccgtttaaatgatcgacacattcttctttccattcaatataagaagctaataatacttctgtatcagaatgacctttgaacgtataccctcttcttaataattcctttcgaatgtcttctgtgttataaagttcaccgttatagcaaatggcataattcgtttcatcttttaaacaagtcatcggttgtttccccccctcaggatcaacaacaattaaccgtttatgcccaaatgcgacatttcctttaatccaaattttattatcatccggcccccgcttcgctaacgtctcagccatcttcgtaacgacatctctttctccttctaatgagcgtttataatccacccatcctgtaatcccgcacatataaatcatccttccatcttatttcttttcttgaacgtgcagtaatccccaccctaagagtgcggatcaaaaaataaaaaacttgacgataacctactatccacatatggaatagcattctcactcagtaaaacgtgttttattgtatgcccacctatgtctagatgtgtctagttataaagaacgcacgaactgtctataacaggaataactacttttcataaaggagaaatcgtatatgatacaacgtaaacatattttatataaccagccccgtgctcatacagtcggtaatgtagaatatataaacaatgaatgggtattctttgatgatgaaaatgatgaagcgtttctattagaagatattgccgaagatgggtttgaaattttgtataataacaattggttaccagcccgtttctatgaacaagatgtattacaaatcgccaacgagcaacaccatttgcaaaatggtgaaatggtacgtattcgaaaaaagttacttcttagctataatgaatggctcgaggaattacctgactctgtcttcacattattaaccgaatcattgcaatcacttcactactctttatatgattgcatgtattgtcataattatttatctttcttaccgaaagaggagtcacgcgaaggagtaaatattcttttgtttgataacgacgaaatgatctgtacactgcagcaccatttcgtccgtcacactacgtcaaataaaaatatgttccgttttacgaaagtaaatggagaagagttgcatatcgatgcgacataaaataaaaaaccaccttatctcccaagtctttgagattataaggtggttttatttttatttgaatacgtaccagccaagtggcaatttcagtcctaagtataatactgctactagcgcaacaataaataagccccaaaccgcccctgttggtttgtttttgctcatttttacaagaaccatttccattccgccgataactaaaataccagctaacattttcaagccataccacatgtgcatgctacctgttgctgtcttcacaatactcatgtacaacatgaagcctgtcacaataatgatgatatacattaggcgaagccccatatgtacacccttaccttttcttcctgctgaataaagtgaatacgcaacgaagaataaaattaaacctaacgcccatgctgtaatatgcatatgtaccatcgtatcccttacctcctcttttcacactttttcactctatatgataacatgttcatttattttcaggaaatgtttcgcttttttacatttaaatgctataatatttagagtatttacaaacttcttgtaataacaaaagggggaacaatcatgattcaaactaaggatattatcgaacttacagacacatacggagcaaataactatcacccacttccaatcgttatttctaaagcagaaggtgtttgggtagaagatcctgaaggaaaccgctatatggacttattaagtgcatattctgcagtaaaccaaggtcatcgtcacccgaaaattattaacgctttaattgaccaagctaatcgtgttacgttaacttctcgtgctttccatagcgatcaattaggtccttggtacgaaaaagttgcgaaactaactaataaagaaatggtacttccaatgaatacaggtgctgaagctgttgaaactgcaattaaaacagttcgtcgctgggcttacgatgtgaagaaagtagaagcaaaccgcgctgaaatcatcgtttgtgaagataacttccacggacgtacaatgggttctgtttctatgtcttcaaacgaagagtacaagcgtggattcggtccaatgcttcctggcatcgttgtaattccttacggtgatttagaagcattaaaagccgcaattacaccaaacacagcagcattcattttagagccaattcaaggtgaagcaggaattaacatcccaccagctggttacttaaaagaagcttttgaagtatgtaaaaaagaaaacgttttatttgtagcagatgaaatccaaactggcttaggccgtactggtaaagtatttgcttgtgactgggacaatgtaactcctgacatgtacatacttggtaaagcacttggcggcggcgtattcccaatctcttgcgtagcagcaaaccgcgacattttaggcgtattcgagccaggttctcacggttctacattcggtggtaacccacttgcatgtgctgtttctatcgcagctcttgaagtgttagaagaagaaaaattaacagagcgttctcttcaattaggtgaaaaattagttgggcaattaaaagagattgataacccaatgatcactgaagttcgcggtaaaggtttattcatcggtatcgaattaaacgaaccagctcgtccttactgtgaacaactaaaagcagctggtctactatgtaaagaaacacatgaaaacgtaattcgtatcgcaccacctctagtaatctctgaagaagatttagagtgggcattccaaaaaattaaagctgtattatcgtaatgatagagaggttgtccgacatgttgggacaacctctttctttttatattcatttacattaagataattttgtaattttctgtattttaaaatcgtaaaggaggtgcgatatgctattaagatatggtaaacatattaactatttagctacatcttttattttagttacattctttggcttcctactttccacaacatggcttactcactactcaactcctactacattcacactactgaaagcatcattttggactgctgttattcttactatcattggttttggacgagaaaaaagcgcacttacggttatactatttggcatttgtacacttgcattcattggtctttacactttttccgttattgattacctctataacccaaggccataaaaaagagctatcttttaacaagatagctcttttcttcacttcactacatttcgcaaagtaccaattccttctactgtaataaccacttcatcaccagcatgtaaaaacttcggtggtgtgaaaccttttccgacaccagccggggttcctgttgcgataatatcgcctggttctaaagtcattcctttacttatcgttgaaataatttcttctattgaaaaaatcattttatttgtgttggaagtttgccttacttctccatttactaccgtttcaatgtgtaatgcattcggcgcattaaccaccgatttatgaattaaatacggtcccatcggacaaaatgtatcgaagcttttcccaaggaaaaactgtttatgttttctttgaatgtctcgagctgttacatcatttataatcgtataaccaaaaacatgctcaagcgctttttctttttttatttgcttccctcgcttaccaataatgatagctaattctccttcgtaatctagttcgtccgttgcatgagggtgaccattaatttgctcatttatgccaataactgttgttggtgctttcgtaaaaatcattatattttctggaatagactctattccgcccatttctatggcatgctcacgatagttttttccaacgcacaaaatattctttcttggccttggaatcggtgctaatattttcacctctgttaacggataatacgccgcttccccgttctcttttgcccaatttacaatttcacatactttctcaaagcattcagttcctctttcaatacactctaacattgtaatagggattgtaaccttttcccctttttgtctttgcgcttctcttaagtgtaatacctttttttcttcttcatccacaatacctacaaataccttttcttctttcttcgccgttacaaaacgcaatatttccactctccatcctaaaactcatgccctttaattgtattcgcatccgtaagaaaaaaaccttctcatacacgctaatttttacaatattcttctcataccctattcgttacgcctttatatttggcataaaatgtagaaattttactttttttagcgaaggtatttcttttttatggagtttttgtataatatgtactacatatatactaaaaatttcatttagagatggagccgatttcaatgtttgagcaagcgattgaaaaaaaacgtgaaaaaatgatttattttgctgaacgctatggaatgacttctcaaaaaacagtggattgtagccaagaactggacaggctcttaaatgtaatttggcatgtacatacggattttcacccaaatcaaacactcgacacacacacgcaatagcgtgtgtgtgtcttttatttcaaaaaaacacacattttattgaaaacgcccatacaatagtagaaaagaaaattttaaaaacgaagggtgttttatatgccagctatggtcggacatattcgtatcgtcaatattggatcaagtggtatttttcatattggagatgtatttgcgattaggcctattagttactcacgtgctttcgccggggccggctctttcaacgttggagacaatgtttctgtctacaattatcaaagtgcaacgactgtcaacgattcagatgtaatcgatcaagcgataattggctcaacttaaaggaggcaattgcattgaatttttatgtaaaccaaagtatcatcatcaacagtattaaaattgatagcattacaacctcttctgtgttccaaattggtactgccggaagtattaaagccctatctaaattttcaaatacgggcggatttacggagccgcttcgcccattacaggcgaaaggacaaattatttctatcaaaccatcaactagttcttcttaagacatccttgtcataaatatatagcaggaatatttttaccctccctattgaaaaggaggtttcacaaatgaatcaagatatatatacttacttacaccaacttcaacaagctcttcaaacacaacaagcagccatcctgaatttagaagatcaagtgcgccaactccaagaagagcttaacgaattaaaaaatcgcccctcctcttctgtaggaaaagtggaatacaaattcgatcaattaaaagtcgaaaatttaaatggtactttaaatattggtttaaacccattttcagcaaaaggacaacaaattgaagattttcaagtggatacagaaacattgaaggtaaaccctgaaactgaaacaaacccagacttttatcaaggtatcctccaagaaatgcatcgatacttagatgaagaagcatataatcgtattctccattttgaacaagaagagcgaacaccgcttgatgaaatgtatcgacaaatgatggtggatgacataaaaaaacagatggagcatcgactcccttattatttatcacaagtgcaatcatatgaaggtatttcaacagatccagattatttacgagatatcattattcaggcaatgaaacaagatattgacaaagcctttctctcctttattcagcacataccgggaaatttccgaaaggagtaagtatgtatgaaccttaacgttgtaaaccgtgagttaaaagtcggacagattaaaatgaacggtgtatcgtcgtccgcactctttttaattggagatgcaaatctcctcattctatcttctattctcgatacaccatttgaaacagttacagagggtccatttgtaccattagtaacagatgtccctcctactccaggttaaggagactgagaaattatgttgcatcatgtgtctattgtccaaaatgtttctattatttctttagggattgctgctgtatttcaagttggagatgcaaaccaaatggaattaaaaagtagagctattgccgtccaccgtgaaattcctttttatatacggggagaaggtcgctttgatgcttttgaaatctttacagatgaacacattacaattccaaaacgaacgacagatgtaaaattaaacattgtaaatgaatgcccttttattgaagttaataacgttgaattacgcacacttttaaattctggttgctttcaaattggaaatgttgattatggttttaataactctcgtattatacaaatccgccaatatattacggatgaaccttccgcacaataattcatatagtaattaaaaagcttagtaaagtaggtggatggtatgccttcggttgtaggaaatctcgtcgtgcaaaacagtaacggctctttcaacttaggagatttttataacgtatctccgaaagaaaacacgaaagcctataacggatctggagcttccaatgttgggtttgtcgtgaatacgtttaacggtgttagtgcaacgaatacatttgattctgatgtggcagatcaagatcagattggaacagcgtaaaaaaagtaggagatattctcctacttttttcttttatctaattcaaaattattaaaataaaattttaataagcaagagctttactgtccacaaatagtggtataaacaagtaagtagtgaagaggcactatttcattttatttaaatgataacccgctctcctccaaagccctcctaagcttcggcaaagacgcaggtcccataccatgcagttttaatatttctttttcactatattttgagagttcttctacagtttgaattccatggtgttctaatgcccttcttgctggcgctgaaagaagagagagaaaaccttcttttggttttctctctttctcacagactgggcaagttggacaatcgctacttttatagtactcgtgtccctgttcacaagttcttaacgttttttccgttaccattttcaagcccctctattcttcaatatttacaacgtgattcccatcaaagaagtataaacatttctcttttacaggatgttgtaagcttttctccagtgcttttgcatataacgaaagctgcactttatatcgatcttctaaaattggtttcgcttgttcaaatccgcctggaaatttcccttcaatcgtatctgttttgaagtcgattaacgtaatgccatcttcctcttcaatcatgcagtcgataaccccttggacaagaatcgattccccgctattcccttgccaatcttgatatgcttcttctgctgcaagcatcatcgtaaatggaacttcacgctcaacacttttcgccgctaatacccttttacctaagtcactgtcaaagaatgaaattactttttcaatcgctatttcttccgcctgctcgaatgttaataattccttatttaccattccagcaatttgctcttgaagaacttcaaccgtaatcggcttcttcaaatcaacatgctgcataacggcatggactgctgttccgcgctctgcgtacgttaacccttttttctccataaagcgcggacgtgttttaattggtgcacgtagttttttaataaaggcgttatcactaccatcttctgattgataatttctctttatttctgtaacagattgcttcgcacggtgagatgttgcttcctcatatccgtacttccacattaatctgtcgtacacttcatcttttcgttcactttctaacggcacagcctttttctcacgaagcgcttctaacaattcttgtttctcttcttgaactggctctggtgcaagtagcgtattaccgtccacaacttctactttccagctagtgtcatacccgtaaatttcatctggaatacttccttgtcctaattcaagaagcatttcactatcacggtgtctatataatgaaggggcaatccagtctaaataacaagacgccccggcacgtatgtgatctggtaataaccattcactatgttccctcgcatcaagccatttttccatttccttatttgcatccttaactgttccgattaaaattaacttctctttcgcgcgcgtcaacgctacgtatagtacgcgcatttcttccgcaattaattccattttcattttacgcttaatcgcaagctgtgataatgttgtatatttaattcgtttacgcggatcgataaattgcgaaccgaaaccgaaatctttatgcaataagaaacgtttcattaagtcttgtgtattaaaacgacgaccgagcccagctacaaatacaaccgggaactctaaccctttacttttatgaatcgtcataatgcgaacaacgtcttcttgttcaccgagggccctcgccgtacccatgtcatcaccgcgttctaaaatacgttcaataaaacgtaagaagcggaataatcctctaaatgatgttgcttcgtattgtcttgcgcggtcatatagtacgcgtaagtttgcctgcctttgctttccagctggtaaaccgccaacgaagtcgtaataacctgtctcaccgtacactttccaaattaaatcagaaagtgattgttgacgtgcaaattcacgccatccttgcagtaagttataaaaccactctaatttatcatgaagttcttgctcctcttcaagtggtgccccttttaagaatgagctcattacttcataaaacgagcctttctttccatgagcacgaagcgttgcaagttcttcatcgctcaatccaacgattggagaacgaagtacagctgcaagcggaatatcttgcatcggattatcaataacgcggaatacgttcatcataatatttacttccgtcgcttcaaagtaaccagtcgcaaggtcagcgtacactggaattccttgtaattttaactcttccataatttgcggggcccacggcatggagcgaagtaaaataacgaagtcgcggtattgtactgggcgcatactatcatttttacggtcatacacttcataacctgaatcaaccatcgctttaatgcgctgcgccataagacgagcttcaagctgtgctttttcgacttctgcaccttcttctccgtctattacttcttcttccgtttgctgaatgcacagtagttctgccgctacatcttcaccttctggataggtagcacctaactttaattcagcgtctgcatcgtagtcgatttctccgacttcttcacccataatttgtttgaagataaagttcgtacctgctaacacttcatgacgactacggaagtttttcgctaagtcgatcttcattccaccgcccaatccttcttgtgtgaagcgtttatattttcctaggaatagtcctggttcggctagtcggaaacgataaatcgactgctttacgtcaccaaccatgaacaagtttccttcactctcagaatctttcgttacgaatttaataatagattcctgtacaaagttcgtatcttgatattcatcgactaatacttcagcaaatttattacgatattggagcgccactgctgacggattcatttcaccattttcactttgttcacttaaaatttgtaaacagaaatgctctaaatctgtgaaatcgaccattcctttatctcgcttcatcgcttggaaacgctctgtaaatacttttacaagttgaacaagcttttctaatactgggtgcatatcttgaaaatctcgtaagaaactttcaggttttcggctaaataactcttcttgtaatttcttcacttcatctttcgctttattacgaagagagtctacttgttttacaacatcttcattgtaatcacttttcttaatacgctttaacgtttgccacgatacgttttgcatcgcttcatacaaacttgtccacgactcctgagcagctgatgatagcgttccaagtaaagctacatctgcttgcagggtttcaatgcgaggcgctggaccgtcaggaagcattgcgagttcagttgccttacgaatatgctgttccgctgtttcaagctggaatttcacatcttctaataaataagaagcatatactaaatcttcaattgtctttccttctacgtcatatgcttctactaatttatcaagccatttttccggatttggatgcgctcttgactctgtatgaagcgctaaaatcatacgttgtaagtcatcatcactacggtcactcgtataacgatcaacaagttcaaagaagattgtattatcttcgattccgtactcttcttctaatatgtcatctagcacttcttcttttaacaattcattttctgtttgattcgcaatacggaaacgaggatcaacatcaagcatgtagtaatatcctctaattacttgtaaacagaatgagtgaattgttgaaatggaagctttatttaataggctcagctgctttcttacgtgttgagagcctggttcatcaattaataccttttctaacgcttccccgattcggtttttcatctcttgcgccgctgcattcgtaaatgttacaacgagcaggcggtcgacatcgactggattctcttcattaataatctttttaataatacgttcaactaatactgctgttttccctgacccagctgcagccgcaactaaaatatcacgtccattcgctacaacagctttccactggtcatctgtccattgactaccttctggtttttcaggccaattttctatcattctccgccaacctcctctcttattttctccatcgcttcgctatctttcatatcttttaacgatcggaactgattatcttcaagtgactcatcaaattgacaaacagatttgaagttacagaacgtacatgctgctttatttcccattttataaggagcaatatcgataacaccttctgtaatatcttttccgatattttcaaacgtatggtgtacatatttttgcagtacgttaaactcttgctcacttgcaatacttgaacgcgcactaaagctaccgtcttttttcaggccagcagaaataatatctgaacttcctgttgaaagtttgttatccattaaacgaacaacgtcagcatctcctaatacgagtcctttcattttaaatttctttaaaatttctttttcaatttcagcttcagatgcgtcacctttcatctcaacgattgggttatgaatatggaaatacaatacaccagctggtgatgctgcgtgaccttttttcatccacgtctgcgcattcgaagtaacaacatctaaatacgttaacatttgaagtgctaatccgtaatacacttccgttaaatctaacgcttttgaacttgatttataatcaataatacgtaagaacgtcccgttttcatcttctgccttatcaacacggtcaatacggccgacaacttccatcttcacaccatttggtaatgagaattccatcggcggaagtgatcctgtaccacccataccgaacggcacttctaaatcaactggtacgaatccgcttgacttcgcatgttcacgaagaatgattgacgtacggaaaatgatttgttgtagtttttgttttaaatagaaatgacggtttgaacttaataaaatttgtcgttgtaataacggtgcgatttcttctattactaaaacagaaagatgctcacactcttttatggataaatccgcccaagtacggttttcacgcaatagcttgtccgcaattttctttaatgccgcatggaataattcgccgatgtccggcgcatcaagcttgaaaatatcacgctctctaagcgataaaccgtgctgcgcaaaatgagcgtatgcacaacggttaaatagttccatacgagagacgcttcctttaattatatctccgtataaatctctacttactgctgtacttagtttcttcgcacgatttcgatagaataaacttgataagacgcggctacttttttgtttccattcatctgaagttacgtagaaattatatacgtcccaccaaaagtctaaattcccttcaaatccgtatcgcttccacgtttgtagttgctgcataacgtaagataacgttacttctggcgttgctacgtatgaaatttgttctgaacgtgataaatcgtttacgtcattggtaataaatgaatctttcacattagggaacattctttttattttcttaataaagctagacgcaagtaacgtctttccttcttcatctgcaagcgggcatgaaatatataacttctcagatgctctcgttaccatttgatacataacgaactgttcttctaacaaagtttgtctcgtcgttggcgctaattcaatccctgctgcaccaagaacttctctttcttcatcagaaagcataccttcgtccataggtgctgctggaataacaccctcatttacacctataataaacgttgctttcacgtcagataacctggagtgatcaatattagcaattaacacttggtctaatgacggcggaatgttagcaaattgaagtgcctcaagacctgtcgacataacgtccgtaaacatagaaagagacattttctcttcaccaagcatctctacaaacgtatcaagaaggctcattacttcttcccatacttgttcatgatctgtcgcaaataagaaatctccactttcttctgcacgtatacgtaattcttctagttttttcggaacatccagctcttctagaaataagtaaactgcttcacacatttgcataactgttcctgcacgctttaaccttttttgcatgcgaataacaggtgttcttacaacgtcacgcaatcgatttattttctcttccatttcacgttcactatctgtgatcatcccgttcgtatcatcaagagaacgataacggcgatacatccatggatcctctgaagtccacctctttccttgtacaccgtacgctaaacagtaattttcaaattcatccatttcttcacgcatcgtttcttttcttacgtctaatggatataaaagctctgttttcacgcagcggaacaccgcatcataacgccaattcccactaataatctcgagtgcagaacgaatacattctactaatgggtggtgtgacatcgggcgcttttcatcgatgaagtgtgggatattataatctgtaaataacgttcgcatcacatcgtaataactttccccattacgaagaagaaccgcaatatctcggtaacgatagttttcctccgccacaagtttacgaatttcacgcgcaacaccttctacctctgctcgtaaattcgcagctgtactaatcgttacactcgcttcaccgttaaatttttcattcggacgcgcttcataatgagcttctaaatgcgctaatgccggagaatgaaaacgcggctgttccataagtggaattgttttttcaatttctattttctcttcacgcgctacttgtttgattttttcatacgttaacgtcgtttcataaaataaatcgagttcatttactggctgtgctaacgttttttcatctatcgttaacgtgatcgtaactctcgctccgcaaatcataagctgtcttacaatctctaactcttgcggggaaaatgaatgaaatccatctatataaatttccgcaccatttacatattcagactgcggaagcttttccactagcaattgtaggtagtcttctgaatctaaatattttccaattaaagcacgttcaaaatcatcgtataatagctgtaaatcatacactttattcgctagtaacttttgttcggcactgctactatgcgcatccaattgttgccacatttcatatacgttagatggcgttacattgtaacgtttaaactctgcaatcatactgccaagatgttcaaagaaaccgttttgctccgctgctttttggaacaccgataatccatctttacgagactctacaattttacggagtaacatatgtacacccgcttcatcaatatgaagacgactcgctccgccaacttcttgtagtaccttccacgctaatcgtgaaaaactaaaaacttgtgcccgaatagaacctcttacatcctcacttccaattaacgcctgctgcgtctggaatgtcatctgttctggcacaagatataatattgttttccctctcgggcgttgttttaactcttcttgcacttcgcgtaaacaaagtgtactttttccacttcccgctctaccaatcacaaatcgaagtgacatgtaaccccacctttcacttacataacgaacgttagtttgctactataattgtattatagtacacgaaaaaagacaaactgagttgtttgtcttttctatacttctacttcattatatcaaccttttgaaaaattcgtttgcacctcttgaattggccaatatcgcaaatcaactttaccgacaactgtatcagcttttacaaagccaaagtgtctactatcccagctcccgagccggttatcacctactacaaaaataaacccgggtggcaccagcttttctttcgttaactcttctaatgtaaagtcgcctgttagttgccttccatttatctctttcttatacttctctaaatacggctcatcaataaattgaccgtttatatataacttatcctgcttatattcaatatgatctccaggtaaaccgataacccgctttacatagtcctcttttttattcgcatgaaataccacaacgtcaaatctgttcaagtccccaacttgataactcaccttatttacaactagcatattgccatcttgcaatgtcggcatcattgacttcccctctacaacatacgttgaaaagaaaaacgttcgaaaaaatacagctaataatacaccaattaaaattgttcgtatccactctatgccttcttttttcaaagttttcttcatctgcttctccccttatcctttaatactgaagctttcctttacaaagaagactattcttaatgtagttctaactttacttcgattttcttaccgacataccataaaataaaaataccaatcgctacaataactgatttcactggattatgaataaatgacattaaatcatgaccgatatacgttaaaataaaaatcatcacaagttttccgaatgctaacgctagaccaaactgttttacactaattcgggataaaccagcgacaacatttatgagcgctgacggtgtaaacggaaaacaaaatataacaaaaatcggtgcgaatcctttcctttcaacccaccccattgcttttcgtactctctcatgcttatttacaaacgaaaagaaacgactgcgaccaaaatggcggatgatgaaaaagacaagtaatgcacccattactgatccaagccatgaataaagaaaaccgagccaaaagccaaatgcaacagcattcgccagtacaaatacaataagcggtaatgctggaatcaacgcctctatcatcggtaaaccaataccaagaagtggtccgaacgctttataactctcaacaatatgatccatattttctggtgaaaaatactctttgattgtctgaaaatccattctacactttacccctttactctaaatactatccctactgtatcattgcttatatgaaagaggaaatggtagatacgacatacggagatgtatttattaaagtttccatatctttcataagaattccttcattatttagctatgataatctatcaatattcgacaggacgtgtcgttcattttgttatttagattgtttttcggtttttatcggtaaatgaaattatactggtgattttctaaatatatcaattacaactcgttttttctaatatatcgccttatctacaaagactgactgacaaacaaaaaagaatggggattcccccatcctttcacacttcgccttccttcacaaaatacaccttctcataagcgggtcttaatgttgattcctcttttttatcgacctctttaaaacaaggattcccttgttttttcctacgatcttcatattcagtacgtaatttcgctgtacgattttgttgattttcaaaactagtttttgatatttctaatttcacagcaaagccatttataaatctaataataagatttccatcttctaattctttattactttcaatataaaaatgagacaaccaagcgcactcttttctagagtaagaataggtagggaaaaaataaagttgatctgctggactaatcgcaatcggtgctttatgtgtaatatgagttaactctttcgttccttcttttctgcctaagaaactagagccatgcttgcggcaacttctttctataatatctagaggtttttgaaatacgaaaaaagaatcattcatttcaacgactcgcgtaacaattttcttttcacttagaataacaggaagtaaggccatcgtatttttcgttacaacataattttcgacatagcgttccactttactttccatactccattatctccttttttccatttatattagcagctgcatatataattttagcatctatgaaaaggaaatagcttacaagttccgcttttttacaattttttatcatttatcaaacatttgttaaacaataaaatcacaatatagaaattaattaattttaaagttataaaaacagcatttatactacctataaatatttattatccattcctcatttcacatcattacaacaactaactttgctataattaaaatgtaaatccaatatatggagggccactatggaagaaaaagagattcaaccatcgattcaaatgaaaaatagtagcgtcattatcgtgaaaaactcagctagtattatattcggtttatttttcattctgctattctttgccaaaccgtttcgtaaatcaaaatgtccagaatgtaaaaaacgtgagaagaaaaaatcagggcaagaacaataaaaggccttcctttatggaatgcctttttacatttgtagtatcattttatttattcttcttccccctaaaaaacgactatattttcttccaaggttctctacatcttttttgatttgtaatataatccttatataaaacatgagaaagagtatttgtacttgttacccgcttttaatttttattaaaaaattaaaatttgtacatctttatccatcactaacaattcgttaattagttaactttgcaatataagttttgtatataatgtcattcaaaaacaaaatatatataagtagctatttataattacattgctttttatcgaattctaaaaaggagttgtatactatggataaagaaaatccattaaatcagcaggttaatagcattccctcagatgctctgaatacccctagtaaggaacaagaacaactgttagaaacatcatctcaaaacgtacaaaattccaacaacaacgctaacaaaaaagatgttactcaaggtctatctggaaaagatttctccatttcaacagagaatacaaatttatagttatttactatcatacgcagcaaatgctcttgctgaactaattcttctacagaaactaatacgcattccagataattttttaccagttgtaacatcgaaaaagagatttagatataaaaacaggctctaaaaaaactttctccacaacaaaaaaaggatggcattagccatccttttttccatcatcaactataaaattatagtttgattacgtttttagcttgaggtccacggttaccgtcttcgatttcgaagctaactttttgaccttcttctaaagatttgaaaccgtcagtttcgattgctgagaagtgtacgaatacgtcgttttcgcctggaacttcgatgaaaccgaaacctttttcgttgttaaaccattttacttgtcctgttactgccataattatttcctcctaagaaaatacaaattttaaattttttagtcttcctgtctaaaaaaagaatccacacattatcaaatacgaaacataaactagttctcacatactttttctcgttcgttttcagcacttgataacatatggattgcttaatttaactattcaactgacatcatcatagcacattaaaataaaatgtacaatctttttcgaaaatagaatttctaatttttagtatttcttataaaatataattatctctattctaaataaggaggagtttatgaccaataaaattcctagaaaaacattaaaaagaattgaagaggatattgaaaataataatcttggaaaagcaagagatagattgcatggcctcatctttacatacccaaatgaattacatcttcgaaaacaactcggagatatttattataaattacaatatccagaaatggctggacgttactggtatctagaagagcataaaacaggtattatgcatgaatcatgtttattatttgaaaaatcaatgggaaatagtcctcatcatattgcacgtgctttaaagtttaaaggcgattctaaccatataaaagggttgtataaagatcaacctttatcttcagtgcagaagaaagtagcagaggagttaatttatgagtataaagaaacatggaaagataagctagttccttttggctgtctagcattgcttgcttccctcctcttttctgccgttgttggtctattcactatttggaattggattttttaatcacagggggaattttcacatgtcaaactacgctaaagaagaaaggctaacagggggaaacgtctcaagcgtatatcgttctgaaaatactgttcggcgagagttaaagccaggcagtgaaaagattcataagctattgcaatatttagaaaacaaaggatttcattatgctccaaagtttttaggtgtagatgaaaaggatagagagattttatcctttattgaaggagaagctggcaattatcctttaaaagaatatatgcgatctaatgatgtattaaaagaaatagcaaagatgctccgcctttaccatgatgctgtaagtgattttccgttattagctgattggaaaccgatggatcatactccaaataacattgaggttttatgtcacaatgattttaccatatataacattatttttaataataagaagccagtagggattattgatttcgatgttgctgctcctggtccaagactatgggatatcgcttatacactctatacttgtgtgcctttaagtagagtgtattatactgaatccggtgaagccgttcattatgactcatcgcaacatgcagatcgtattaaagagagagtgaatttgttcgttcagtcctatgataaaaatatggatgaagattacttaggaatggtgttgcttcgattagaagggttatgtacatatatgaaacgaaaagctcaagaaggcgacttgaatttccaaagaatgatcgatgaaggacatctagagcattatgagaaagatatgaagtttattcgtgatcatagggctgagtggagttgatttagtaataaagaaaagttagtatcgttttttgccgacaactcaatctctcttttcgaatcgtttagaaaataacaaggggcacctttcaaaaaggtgccccttccttttatttcataaactgtgcttcttccgtagatccttttaacgctgtcgttgatgaagttccgcctgtaatcacttgtgccacttcatcaaagtaacctgttcctacttcgcgttgatgacgtgttgcagagtagccatgtttttcagctgcgaattctgcttgttgtagttcagagtatgctgccatgccgcgctctttatagccacgtgctagttcaaacataccgtaatttaatgaatggaatccagcaagtgttacgaattggaacttgtaaccgtaagatgcgatttccttttggaagcttgcaattgttttttcatctagtttttgtttccagttaaatgaaggtgagcagttatatgcaagtagcttccctggatgctccttatgaattgcgtccgcaaatcgttttgcatcttctaaattcggttctgacgtttcacaccaaacgaggtctgcgtacggtgcatacgctaaaccgcgcgcaattgcttgatcaagacctgcatttgtacggtaaaatccttctggtgttctttctcctgtaataaatgctttatcaacaggatcaatatcgctcgtaattaaatcagctgcatccgcatctgttcttgcaacgataattgtcggcactcccattacatctgctgcaaggcgtgcagaaattaaattgcgtactgctgtttgcgttggtagtaatacttttccgcctaaatggccacattttttctctgaagataattgatcttcaaaatgcacacctgatgcacctgcttcaatcatacctttcatcagttcgaatacatttaattgcccaccaaatccagcttctgcatctgctacaatcggtacgaaatagtctgtatcatcgcttccttccatatgctgaatttgatccgcacgttgaagcgtttgattaattcgttttactacagcaggtacgctgttcgctggatataaactttggtctggatacatatgcccagaaaggtttgcatcagctgctacttgccaaccacttaagtaaatcgcttttaacccagcttttacttgttgcatcgcttggtttcctgttaatgcgccaagtgcgttaatatagtcttctgtatgaagcgatgtccaaagcttctcagcaccacgacgcgctaacgtatgttcaatatcaattgacccgcgcaggcgaattacatcttctgccgaatatggacgtgtgatccctttccaacgctcatctaattcccagctttcttgtaacttctcgattctttcgtttttcatttgttccatccccttttcattttttataaaatttcataacccggtaatgttaaaaatggtacgaattcatcatttcgaacgagatttgtaaacaacgttgtcgcctcttggaatctccctttcttaaaggcttccttaccaatctctctttctatttttgctaattcttcttcttttaattcttccattaattcaagcgtaatattacgaccatcatttagttttccaccttcatgacgaatccattgccatacttgtgctcttgaaatttcagctgttgccgcatcttccattaagttataaatgggtgctgctccccgtccgcttaaccaagatgcaatatattgaatacctacgctaatattcatgcgaaggccctcttctgtaatcgttcccaccggtacctctagtaaatcgttttctgttacacatatttcttcacgtcttctaaaaatttgatttggtgttttcataatgtgattaaacacttccattgcaaccggtacaagtccagggtgggcaacccaagtcccgtcatgaccgtctaaagcttcgcgttccttatcagcacgcactttttcaaaagctgcttcatttgcttctggattatttttaatcggaatttgtgccgccattcctccaattgctggtgcattacggcggtgacatgtttgaattactttcaaagaatacgaacgcataaatggcgccgtcatcgtgacttgtgctctatctggtagtaagaatttattatgattacggaaactctttaaaaagctaaaaatataatcccatcttccgcagtttaagccagcagaatgatcttttagctcatacaaaatttcatccatttcaaacgaagcgtgaatcgtttccagtaacacagttgctttaatcgttccatttggaatgccgatatatttttgagcaaatacgaatacatcattccataatctcgcttctaaataactttccattttcggtaagtaaaagtatgggccgctcccttttgctaaaagagctttcgcattatggaaaaagtacaagccgaagtctactaagctacccgacatatttttcccatcaacttgcatatgcttttcctctaaatgccatcctcttggacgtacaatgagtacagctgttttctcatttaatctatattctttccctttatcattttcatgtgaaatcgttccctttactgcatctcgtaaattgatttggccttccactgcattttcccaagttggtgaattcgaatcttcaaaatccgccataaaaagatgcgctcctgaatttaaagcgttaatgaccatctttctatctaccggtccagtaatctctacacggcgatcctctaagtcttttggcagcttggcaattgtccaatccgcttcacgtatgtgttttgtttcttctagaaacttcggaaactcccctgcatcaattctcttttgtttttctacacgtttttgtaaaagttctatgcggcgctcattaaaattctcatgtagttccttcaaaaaactaagcacctcaggtgtcaatatttcgctgtacgctggtaacatttctccaacgagtgtaacccgtgaagtttgcgtcgacatattagcatccccttcttaaactgttttataacagatttgatttcatgttttatattatataacaaatcttcagaaaaggaagttttttttgaaaattcatttcgtttttttcaaaacgccattctttcgcgctttatttcatacaaaaaaggccgctgttatacaacaacgacctttttgtattatttttgaatttcactttgactagttaaactttattactgcccttgttccatatcatgcaatattgctctatgtaaaaactgtgcgtattgttctctcgttaccttcatagacggaccgaatttaccttctccgattcccattgtaataccatttgtttgtactgcactaattgcattcgttgcccatgaatttgctgaaacatcattaaagttatgagatcgctttgcctgtaggtcaaaagcattcgtaagaacttgtgccatttccgcacgcgttaacgtcgccttcggtctaaagtttccattctcgtctccctggaaaattccgatttccgttagagccaatatctcctcgataaagcttgttgaattttcatcgatatctccatatgggttttcatattcatcttgttcttccatatcaaacacacggtaaattaaagctgcaacttgctcacgtgttacattatccccaaaaccgaatattccatcgccatatcccaaaattatttcttgttccgctaattcatgaattgcctcatatgcccaatgtccttttggtacatctttaaatacaattgtatttgctttttgcaacggtgcactttccgcttttacactattactctctgctgagaataacaccccacccataattgttaatgctgtagctgtttttaataattttttgctcatcaaattatctccccaatatgtatatgtttttttaaaaatatacagaataaatggtatagtgacaatatattttccgacacatttcgtgacggttttgtgaatcatattacacatcatgtctttttcatcgggttgattataaagcttgtttataatcataaaaatacataaatacgaataataattcttttttaaacaaacaaaaaagcacaaatttttctatttgtgctttcatatttcactctacttccaatcctctttcaaatgataattaataatcgcattattaataaactgagcatattgttctctaggtacagggcgatttaattcatacatgccattcccagttcctctcacaacattattagattgtaacgcactaattgcatcttctgcccagtgaccttttggaatatctttaaatgtatgtttttgtttcgtttcaaaattaaatgctcgttttaaaatgacagccatttccgctctagagattggtgctttcggcctaaaatccccttggccatcccctgtaaaaacaccacgttttgttaacgctaaaatttcctttttaaaagtggttgtactatcagaaacatctttatatggattcgctactggcccttcttcttttatctcaagtgttctgtaaatagtcccagctacttgctcacgtgttataagatcgccaacaccatacttcccgtttccataccctaatataattttatgatacgctaaatccataatagcatcatatgcccaaaatccgtatggaacatcttcaaacacaatcatttgtggatactcttccgcttttacaggtgtcacattcgcccctgcaaatatacctcctgccattgtcgcaatcatcattacacccaatatttttttcttcattatcctctctccctatttcattcaaataaaatgaacttcattgtttcaggagtactattttttttgtgaatgtaagataaaatgcaaatcttctagaagaaatattcccactacctttctgctttatacccccttctttctttttcaaaaaggaagttgtcacatctaaggtgttatatactaaaacattctacaatctctttataaactccttttcactttataacttccctttattggcacctaaaggagatgcctaatggagattactatattcatggtttatatttcagaggtagcatcccccttcactgataactcgctttcgctgaattttgaggtgggggtcttactgcccagcaaataacgggataaaaaaatcatccttttttcttaaaagaggatgatttttttatatttattaacactcaaatatgctactacttttgaagagtaaattgggcaactatttgttttaattttcctgctgcgttatgcatatgttcaattgaaaccgaaatctcttgaacagatttttcttgctgttgaatagactcttttaccctatcagttcggtcagatgatctttgggaaatttgagccatgtcttctgcagaagccgagatttcctcactactcgctgcaatttcatctgtagacatagataccgtttgaatttgctcagatacttgctgtactttttctgtaattgttccaaatactttttctgtatgcattactacttgtgtacctgcctgtacctcattatctactttccccatcatatgtaccgtatggttcgttgttcccataacttgagtaataagattctcaatttgttttgcagaatcactagattgttctgctaatttccgcacttcatctgccacaattgcaaatcctctaccactttcaccagcacgtgcagcctcaattgcggcgtttaatgctaataagttaatctgggaggtaataccttgcataacatcaatgattttaacaatttcttctgattgttctttcatagtctctacttgtttcacaccgctatgtaccgaattttggattgtatccatctgttgaatcatttgtttcattaatttgttaccactctctgcatctaatgctgattgagcagataattcatttacagaggatgatgtattgactatactctgcattccttgcgtcaactcttccatcgcacccgcagtttgttccattgcttgcatttgactctctgcaccatttgcaacttcttcaatatccatagtgattttcttcgctgcactactagatacttctgatgcagatactactccgtctgcatgttggaataaaagctgaatattattctctacttcttgcatatttgttcttagccctgcaatcatctcgttaaaattacttactaatatacctaattcatccttagcagtatactcaccatgtacggttaaatctccttctttcgctctttccatcatacgactaaccgtttgtaaaggagcaactatgagcttgctaataatataacttactatacatataacgattgtagtaactactacaagaatgataaaggtaataacggaacgatcaatcattttttgagaatctttaaatacttggtcagctaaatttgaaacatacgattctagatccactgcataaccagctaactctattcccttcggttttaattccttctgaaattcatttaccatttgtggctcatttgttgccttcgccttttcaaataattttttatatgtatctttataacttggcaaagatttcttcatcttctgaaatagttcatcctcttgcttacttaaattaaaaccatcatcatattcttttaataaagaatcatattttttaagatccttttcaatattatcaattatcccctctttatttgccacttcattttgtgatgccgtaattaattctagtaagttatattctaatgaattttgtgtacgaagcattccttctaataaaattgcagaatattgataatcatctactacaacctctgtatcgtgcttaatcttattaatagaattaattgctacactgctcataattaccatacctaaaactgctaatgaaataagcgctaataatttatatttcacttttaaattttgtaaaaaatacatttttccacctttattcctttatatatagatttttagaattttatagcttattatttacaaaatcgtaataaaaagcaatgataaatattcccaatatgaaacttatatctctataaaaaaagaagtagctatcatgctactcctttttgctttgtttctcatattgttcaaacgtatgaattctttcaaaaattggtgggtgcgtgtataagaaaaattttactaacgcaggcggatttacttggcttaaacttgtttttgataaatattgaaaagttttcacaccagatttcccatccttcgtcatatttaaagcatattgatctgccgctctttcttctatacgtgaaacgtagtttgttgctggttgtgctgcaaaagagaggacagaagaaattaagaaaaataaaggtaaaatggagaaacatgctacttttgaaatttgcaatgtatctccccatttgcgaatacacatatttataatacgactaattaaaaacatacctataaacgatagcaatacataacttgcaacgccaaaatatatatgtttcataacataatgccccatttcatgggccattataaataaaatctctttatcttttaactgcttaagtgttgtatcccacattacaatacgggcgttagggccaattcctgttacgtaagcatttaatgcattcgttttttctgacatatttacttcatatacgtgtttagcaggaatgtccgctttgtctgctatcgctaaaattttcgtttctaattctttatttttcagcgtcgagaagtcgttatacagtggatcaataacgacaggctgtatgaatgttaaaaagattgtaaatggaacagagagcgcccatcctgcgagccaccatctcttcggaaatttacggataagccataatagaacggtaactacgattaacatagtcgcataactttcccaaaaaccgataacatgatcttttatccagctttgtgtactttgtgttgaaatgccgtaatcaacggacactttccggccaatccattgcatcggtaaggcaagcactgttgtcaataatgataaataaaagaaataaatcgcaacttgcaaaacacttattttagtcgtttccttcgaccatttctcaaactttcttgaaatacctagcacaagtacaaataataaaataatccattcaagaggcgtcgctaaaaagtatagtaaatttttcacgcgcgaataatcttggcttagcgtaagctctctcgtactcataaacgtttctggatctgcactcgttcccttatacatgtccggaataagttcatgattccatccaaataaataccaatatataagtaacgcaaatccaacgtacaaaaaaagcgaccaaccgataaccttcttcacgctattccctcctctatgctgcctgtctattattattgtaagttcgtacacgctaaattagaacaagcttattatgtgaattgctctggatctttttatttacataaaaaaactcttctacataagaagagttttacctatctttaaacactttcttcggttcacaatccgtacacttacaaaccaacacgtaccctacttgctttttagataaaataaaaagcctctttaaggaagtacatctattaataaactaaaatcttgtaaagagaaagaactatatttcataataccctgtacagctaaaagtaaaaccagaccgatcacacacatatagttaacgctttcttcattctttttttcagtaaccactccaccacttatacataaaatccctagcaaatggagcgctaaatacatgaaaaaataagcttcctcccagcgcaaaataacattcactgtcgttattaacactagactaagtaaaatcaaataaaaaaacttatttgatgatatcgtttcattcatataattttatacatccctttcaaatttcgaattaatgatgtttcaaagctataaagtaaatgattgtttttataccataaaacaaaaggaaagccaccattactttctcgaatactttatgaatccacatatacttctcttcattctttttgaagatgcgcttcatcatttcttctacaattagaccaaatgttagtaaaaccccgaacacaataagaagagaaataatattttcttttaaatgagtactagaaaatacgtaatactctggaaacacaatcgtatctactacaggttgaagccaatgacaaacacttctatcacacatatctgtaatagacgtagaatctataatgtcttttaatattttttcaaccgtcttcttcatcttatttactcccgactacatctgaaaagctcttttcctgctctgcatatataaccggcacttctttactccaatatttgcgattaacaaataaaaagataagtactaagtttaatcctgttataaaaataataagtccaggaaagaatgtcgtataatttgagaaatcggcaaaactaataattttttctctacttattagaaaagacgcacctattacaaatgcattgtttaacatatgtattgcaattggcatgagtaaacttttcgtacgaatatatacgattgacaatacgatgctgaatatggctgcaccgaggaaatcaacatgtaacaacgcaaacaatattgctacaacgatggtcgctatgctcgttccccattttgttgcaaaacgttgaagtaaaaatccgcgaaaaacaatttccccgataattggtgcgatgaatacgaccctaatgacttgagatacatatcccccagtactatctacaattggttcatgcagggcgttcataataaagtccggtgtaatccatgcaaaactatacatatacaaaataagatacccgtaactaaacatgcataacataaccgtaatgtataaaacttgtaccaagttaaatgtttcatttttattaacaaataatgaaaatgaaatgtggtgctttctatactcataagaaatccataccatcggaaggatatagaatataaggatatttataaaagaagaattttgtatatgaaatatacttgttagcaaatcgccactacttctcgctattaaaattaatagtgcaaatacaattaaaaaatatctagctcgcatcacttgaaacgggttcacactcatctcctcccctatgttacttttatcatatcatttgattcttaattttttgcgaaagaaaaccttaaaatttccttaaaaattccataagttacaaaatgatgatatgatattcgagaaaattaggagggatatttatgtaccaagcaaatattttactcgttgatgatgaaacagcaattttacaattactaactaccattcttgaaaaagaaggcttttctcatattacaactgcaacatcagctgaaatagctttatctctaactaagcaaaacaattacgatttaattattttagatgtaatgcttcctggacaatctggttttgatatttgtccaatcattcgccaacaaacagattgtccaattttcttcctatcagcaaaagcatctgatttagataaaatatccggattttcatacggtgcagatgattatattacgaaaccatttaatccattagaagtagtagcacgtatgaaagcacagcttcggagacatatgaaacaaaccgtaccacacgaacaaaaaccacactcaatttcatttggaagatttgaaattgatcagcactctgcagaactaacagtagatgggcacattgtcgaatgttctgctcaactctttcaactactactcttcttttgcgagaatccgaactacgtattttcgaaagaggaaatatatgaaaaagtttggggagcacctgcctataatggcgatgacaacactgttatggtccacattcgaaaactacgtgaaaaaattgaacacgatccaagtaaaccagaatatataaaaaccgttcgcgggcttggttataagttcgttacaaagtagggtgacgatatgaattttaataaacgacttattattcaatttatcatgcaacacgtttttgttttagttacattacttatcgctgtagttgctgcttttacttatttaatttttcttcttactagtactttatacgaacctaacattccggattctgatagttttacaatttcaagatacatctcttcagaagatgggcatatttcgttacaatctgaagtgcaagatttaataaaggagaaaaatgattggctccaagttgtagatgaaaacggaaaaatcctctaccactttaatacaccaaatgatgttccggatgcttatacgaagacatctttagtcgcatatatacagcatcatatcgaaagcaattataaatttacatattgggaaattgaattagaagaaaagaaagcacttgttatttatggtggtatgttaaaaagcaatgcgttactgacagcaattcaaaaggatcactcctctttaacgatggattcgttcacattaacagatcaagaaaaacagttactgtctaaagaaaaagcagcacttcaaatatttaatcaaaatggcgaagaggttttttcctatccaactggaaagaaaaaaacattttcagcaatacaaatcgcccttaatgaaaaagagccgtggaatcataaagaaaatacgtctagcttttacgatgcaaatagtggcaaccttctcgttgtgactgcgaaaaatgatcactactatccagatgacgaaattgaagatgtatttactaagaagtttctcatcggatgcggattaatccttcttatcgtatttgtttatttagtcattctttctatttggtacggtaataaattcgggaaaccgttattacatgcgatgcgctggcttaaaaatatcgctggcggaaagtatgaagaacctattagtaaaaaaggaaaacctgtcaggttccggcgatctggtaaagaaaaatggtcattccgtttgtttagagatgtaacaagttcactagaacacctttctattacactcaaaaaaaatgatgcgatgaggcaagtcctccagcaaacacgagaagaatggattaccggtctaacacacgacttaaaaacaccacttagctctattatatggctacgcattattactcgaatcggatcaatataactggactgatcgtgatattcagcaatttggtagtgttatgaaagagaaatctcaatatatgacgacattaattgatgatttaagcttaacgtatcaattaaaaaataacagccttcctgcccaacacgtaaacattgaaatcaatcagttcgttcaaaaagtattattgcagtttattaacaatccaacactacaaaatcaaaatattgaattcgtaccgagctcaaataaaattcaatatttcattgaagaaaaatggtttcagcgtattatcgaaaacttactcgtaaacgcggtaaaacataataatgaaacgactaatgtcatcgtaaaactatcacaaaacgctaattcctttacactctccatttcagatgacggaaaaggaatggatgaaaaaacgaaagaacttctatttgaacgatattaccgcggaacaaacacagaagaaagcaacatcggaactggacttggcctagccattacaaaacagctcgttcatgctcataacggaacaatttccgttgatagtgcactcggaaaaggaacgacgattatccttgtatttccgtttcgttcgtaagaaagatgctatgtggcgtctttttttcttttctgggagagttttgcggtaattgaaattatgcagatcgttttttttgaggtgttttagcggtatatgaaattatatcggcgattttttgaatatatcggcgcaactcgaattatatcagcgattttttgaatatatcagcgcaactcgaattatatcggcgattttctagatatatcgacttaccgacaaaaaccgacaatactaacctacttccctactatacaaagtaaaaataacccttcataactcactatgaaaggtcactccatatttcagctatttccctactaacacaaacacattctcatcaggtgcttccattactgcaacatgtcctgattctgttggaaatggttcgcgaatccactttacatctttattatcttttaaactctcatacgtttgttgtacatcttctactaatacttcgacttccgtaaaattaatatccggatgattgcttattactaactccgaacttttctcatctggaaatttcaatcctattaacgtccaaatagctccttcttctagttctctttctatcatccagttttgcttcattcccatttctttatagaaagaaactgatctttctatatctttcgtatgtatagatacacattctagttttttgaacattttcccatttctccttttatgaaaaagcgaaccatctcccaatgattcgctcttaccttattattttttcttcaccggtatccaaagctctacttgtgcaaactcactcttatcttcgtggcaacgctcatcgtacagttcaaactctgtaactccgcaatgttcataccctgaatgcggaaaccattctgagaatactgcattccaagtttggtgaatagacgataccatttctttatgaggaactttcggcgttgtaaatactgcatatgttgctgcagggaaagtacgctttgcaatttcatttggtacattttcaaagtctgtaacttccattccaataatataagtgaagtcccctgtttctaaattaaaatcagtacataatccaagctctacccattggctcgtatctttacgattcggaatcgttgttccaagatctttttgtaaatattcttgccaaaatgctgggatgtcttgatggttcttcccctctttacttgtcgtcttcagttcataacctgccattaaaaattctggtttatttacaatacgatattccatttgtatgcctcctaaatacggatttaattttctttgctttacattcactctgtaatacatcggtgtttcgatttcttgttttcgatattcactcggtgtcatttgaaataattttttaaaggctctcgtgaacgtttcgtgagattgaaagccatgctcaaatgcgatatcaataactttttcatccgtatgagaaagttgataagctgcccgggctaacctcctctttcgaacatactccattactgtatcacctactaacgcctgaaatacacgatgaaaatgcgactcagaaaaacctgcaacccgcgctaaattacgcagcgtttgtttttccattacatcttcctcaatataatcaattgacctttgaatttgtgtttcatagctttccatctctgttcacccgccttatatgtattatgataaaagagaatcctatccaattcttgacgttttttactataattccataaaaaattgtaacttttttatatgtatttcgttgttatgtatgaagggagggaaatgtagtgaaacgcaaacaatcattagaagacatttactccgagcatatgcaagatttatttcgctatcttctctccctaaccggagattcccactatgcagaagatctcatgcaagaaaccttttaccgaatgctcgtccatattgactattataaaggagaagaaattaggccgtggttatttacaattgcctacaatgcctttatcgattggtatcgtaaagaaaagaaatataaaacaacagaagttgcagaattccatttaccaaacgttccaagtacagaacatgaatatttcgtaaaacatgagattgctagttggttagacagtttatcttctcttccgctcgaaagacgaaatgccctgctactacgagattactatggattctcctataaggaaatagcagaaatgactggtctctcattagcgaaagtgaaaattgaattacacaggggacgaaaagaaataaaaaccataaaggagtgatacagatgggctgtgcagaatttaaaaaactatggaagaagtatgaaaatggaacgctcacgcatgatgaacaagaactgttagaaagtcatattgagtcatgtgaagcttgtgaagcttacttagatgagctgttaacaaaaacagaaccaattaagaaaaagttacctccaaaagatcttaaaattcctttttggagaattaagtggaaacatcgtttacaaacgtttggttttatattatcaatttgcatcgttatctatataatcggcggggtattatcagccttttattttcaagctaataatgataaaaggctaaaagaaattagagaggttccttctctggcacttgaagcaactattccaaatagccgcgttatgggaggcggaacaagtgtagaagcttttttccgtacgaatagccaatttgatttagtaagaaccatcggtaaaaaagaaatgcccctcggtacaatagaaacaaaaagcttcttatcatctgtagatatcacgaagcaaacttggatgaatccgttctatcaaccaaaactcttctttgttcatcccaaaacagagcagggtgattatttaaaggattcatcaaaaaaagtatgggatacacttgcaaaagtacatgatggaaccgttgcagaagtagcaatttcttttgataaagcttacactttaaaagaattagaaccgcttttatatagcatattcgaggcacaaaaactccctccaactcctgtatggtacgctttagatacaggacaagaaagaaaaaatgtagatgactatatcctacatggcggagaagctataggatttccagaatatgtaagattcctcgataatgaaactgacgggcagaaaacgcaagaagacaaagtaaccgaaatgatgcgcgtcctttctatccataaaaaaacagtaagcaaaatagcagcgctttctgagaaagaactaaacttagataaacgttatcaatatgtaaaggataacggtgtaaaagtatacggaattgttattactggcccatcgaaagagttattaaaattacaaaactccccgcacgtacgttatgcgactcttggagatattgagatttggaattggtttgattattaataaaaaagaagtagcgctctaaaaacgatgcactacttcttttttaattcgaaatcactttcacatacatccctctcaccgctttttcataagcaatatcactcatctgtcttatgttttctgacacaacagacgactgaacgattttcccttcacgaagtaacggcggatcaataagacgcactttatttttctgatgtaaatcataatcgtttctatcttcttttacctttacatttcgatgaactttgcttaataaagcttctacttcggggtcattacattgctgcaatttcgaaataagctcctcatcttcaagaagaaaatcatctgcatgaataatccttttatgaagagctacctttaacgttttcgctaacatatcatttccgtaaatattcattggttccataaagaaatcgattacttccttgtaatacgtttctgtaaaccattctgccatttcgacactttgaacaaccattttcccatctacagcgatgacatcttctaaaaaactgtgaacttcttctaaagaaacatacccatatgtatacatatctcgtaatgtataatccactctgtctgcgcataattctggtgctgacctttcgagtaacgtccatttcgaatcatctaacaaaatatcttcatagttataaccatacttcgcaagaatcgctggaatttctgagtttttcacaacagaactaaatatctcttcatgataactttcatcttcattatgaaaaacgtaatcaatcacgtgggaaaaagcagtatgcgatacgtcatgcagtaaactagcgatctgttcttctactgaaccacctagttttttcactaacaacataacaccaactgaatgatcaaagcgcgttacattccatttctcgttcattaagtaacttgcgcctgcttgatgaattccctttagtctttgcatagatttacttgaaattaattcttctactacttgatccacttcaaattctccgtatagtacatctaatatgatcacttacaatccccctttattttgatcgagtcttataatcttatctcttttatgaaattagcaccaacataaatatttattgttatttgtttttattaaaaaaaatagagagccatcagctctctatttcataacccctattcaaatgtaacttctacctgcacaatctccgacctactaccaagtctaagcggtggtccccaaaacccaaatccagaagaaacaattgcgtggaacgcgcctttttgtgcgtatccccagtctagctcgtacattcttctcgttacaatatgattgggcgccatttgtccgcggtgcgtatgaccggataataataaatctacacctgccgctgctgcttgtttcaactcaaatggctggtgatccattgcgataacaggcatcgatttatctaccgtactcattaattgttcaaagctttgacgatctcgctctgttttatctcttcttccaacgagataaaagtcatcttcaattgtaattacttcatctaaaagaatacgaatatcaatcttatccatctcttgtaaaaactctggaaccgctctaccgtagtattcatggttccctaaaacaccatatacgcctaatggtgctttcatttgtttcatgattggtcccatattcttttgaatgaacacacctggatgatcatcgataatatcacctggcagtaaaataatatcaggttccatctcatttacatgacgaacaagtctttttaaatgcgaaacgccagacagtttaccgaaatgcatatcagaagccatcgcaatgcgtaaacttttacgcccctctacctttttcggtatgtgcacctcgtactttcttactaccggactatacgcattaaatactccatacgcaaagataaagataaatgcagctatcacagccgcccctgtccaaataattgccgcttctttctctactgaaaactgtaaaagaaagaccataatattagctaatggcaacaacataagcgcatattgtataactgcaaaccaaatcgaacctatcgttcgcagaaatggcaaaaacttaaacacttgcacgagaatgtacgcatatgaaataaatgcaactatgaaagcataatatccccaagattcccagccaaataccgcatgaagccaaacccatccgttccagccaatgtaaaacataagtagtgtgtatataattaacatggtaaatatattgagataacgaagattcttcacagccagcctccttattgatttcttttattataacttgttatgcacttataacgtaaatattaagcacttcgctcatcatagtaaaaacctatagttgttagacttgtatctaacaactataggcaccatttatatcaacattgtttttacaaatgctctttataaaaacttgttaatttttcaactgcaatttttactggttctggttggtcgtataaatcgtaatgactcgcaccttccacaacaagtaaatcttttttctctgaagctgctttctcataaagctcatgaccatctttataagaaccaaatgcaccttgcttactgccgacaataatttgcagcggctgcgttaataacgtatctgctaaatggaacgcatcaaaaccaattaccgatcccatgctcgtaaagtttagcttatttggagagttaacactttgccctcgtggcgttgtgtaatactcaactgcttctacaatatctatatcggtcatacccgctgctactaactcttcctgatttttaggaatccaatttgtaatcagttcctctgctccgcgtgcttcagcagtacgttgtttaccaatcgcctctaacaccccaattggatcagcttcacgatttaatcggccaatatttgcaccaacaactgtgccaactgctttaatgcggcgctctgtcattgcggcatttaccgcataaccaccgcccgcacaaacgcctaacacaccgatacgttcttcatctatataagaaagagtagtcaaataatctaccgctgagcgaatatcttcaacgcgcgcagctggttcttccatatatctcggtgcaccttcactttcaccttgatacgatgcatcaaacgcaagcgttacatagccttgttctgctaacttctctgcatataatcctgccgtttgatctttacagctactacctggatgcacacaaacaatcgctgcattttgtttctttccctcagcacctacaggaatatttaaaatacctgcaacttgtaatcctcttgcataaaaacggacatttcttttcgtaactgccatatataaaaccacccttacttcatttttaatttacacttgtgagagttaatactcacgtgtatatttataataaagcgagcaaccacttgtttcaatgaccacatttacgcatttgggtgataatacacacgtaacgaaatatgtgtatcaataacggaggaacacgatatggagaaaatcgatagaagaattataaaatcacaaaacgccattcaatcggcatttatagaaatgttaattacagatggatttgatgaaattacagttaaaaacattaccgaaaaagcaaacatcggaagaaaaacgttttacttacactatctagataagtacaatttattagataaaattgtggacgatcatttagaccaattaaaagaaatatgctacgagaagcaaaacaaagaatttatagaaggaacaatcatatggtttgaatacttcaaagaacacaaaccattttttgcggcactatttagaagtaacagcaccttatcatttcaaaaaaaattactaactttcatcatgggtgaaatagagaaaaaattaaatacagacacatcagtaaataaaaacatcgataaacatatcgtcttaaaatttttaggaacagctgtaatgggcattttagagtcttacgtgttggatgaaattgatagtgatgttgcgtttgttgcgacgcaagttggagaattgattaggaggaatatataaaatgaaactttaatcagtggggatttattcatcccctacctaacttctttgctttcgctgcattttgaggtgggggtcttactgcccagcaaatagcgggataaaataaaaccgcatcaatttccttaataaggattgataaaatgctattatcgttatccttcaaaactcatctatgcaattatgcataaccatccattccgttttattttcatgttacgatataaatgtaatacgacatatatcgacaaagataaaaggaagtgattgtatgaaacgttctaaaacatacttaaaatatttagcattatccgctgtttttgctagtagtgctataactctttcaacacctgctgcttacgctcaaacaacatcacaagttgtaacagatatcgggcaaaatgcaaaaacacatacgagctataatacatttaataatgatcaagctgataatatgacaatgtctttaaaggtaacttttatcgatgaccctagcgctgataaacagattgccgttattaatacaactggtagttttctaaaagcaaatcctactataagtgatgcacctattgataactacccaatccctggcgctagtgcaacattacgttatccttcacaatatgatgttgcatttaaccttcaagataacagcgctcgtttctttaacgtagcgcctacaaatgctgtagaagaaacgactgtaacatctagcgtatcttatcaacttggtggctctgttaaagcttctgtaacgcctaatggccctagcggtgaagctggtgcaactggtcaagtcacttggtctgactctgtaagctataaacaaactagttataaaacaaatttaattgaccaaacaaacaaaaacgtaaagtggaacgtattctttaacggatataacaatcaaaactggggtatttatacacgtgactcctatcattctttatatggaaaccaacttttcatgtactctcgcacatacctatatgaatctgatgcaaaaggtaatttaataccgatggatcaacttccagcgctaacaaatagtggtttctctcctggtatgattgctgttgttatctctgaaaaaaatacagatcaatctaacttacaggtcgcttatacaaaacacgccgacgactaccaacttcgtccaggctacacattcggaactgcaaactgggttggaaacaacgtaaaagacgttgatcaaaaaacatttaataaattgttcacactagattggaagaataagaaattagtagagaaaaaataaagtgaaaaaacgaagggactatttagactcttcgttttttacttactcataataagatcctgcgagtaataccgtcgctatgaaattccatgatatatttttaggcatctcttcacctttattttgaaaagcaccatcacaatcatttagccatgcttccattgattctaaataatcttctaatgttatattctcccactcatctttattttctttgaaatctttttgaaaataaaacaggaattctactaatttttcttttgaatctacaccattagccaactcataaatatccatattattactcctttcaaatacaagtaaaatcctcgatctcttcaacacaaaaacattcttttttataaaatgctatatttctcttccaaccaatcttctataacatattgtcctgctatccctgaaggatttttaattttcttcccttcttcttcactaaccatttcaaaatcgattaaaggaccatctgctctccctcggcttacaaaataagtcccctgatccttattctcaaacacaaaatctggaagattatactcccccggatcaaacaattccattggtaatccaccaataattttccaatcaccatctaaccaaccagaccaggcagtatacgccgtaaataatacttctttttgattcttgtaatagtttttaaactcgcttatccgtattttttcatctgtaaataaagaaaaatattctatatatgtttccccatcatatggccgcgtaacattttggcctttcactaacatgccgtacccatacttattaatatttttaagatttatcgcaaaaactatccctggcttaaatgattttttgcgacgcttttttaatttaaacttacaatctactacttcttgttcctctaaagaaaaactatcactctgcatttctaatgcattttttaacattatctctaactcatttatatttggtaatctgtgaggcccttcattatatatcttttcaatctcttgaaaagcatccattaaaatatcaatgctttcatcacttataatcaatttatccccttttatttcctctttataaaaagacatattttctctcctttactctcttatacatatcccttgaagactctctttttctttctatcacactaaaacacgcaccacttcttctaataataaacccaaccattcatccaatttgtttcaaaacactctaatacattcagccttctttccatagtactatttcaagatcatactcattctttagaaaagtaaagccacttctcatagatgcatctactacaataaggctagaataaattaatgatctttgagcatcatcatatccaatgaaatgtaatacttcttttatatataacatgaaatcttccaactctatttgcacaccaaagtcccaattttcatgtgcataccatagaataatcttcttagacaataaactagttaattcacgttcaaattcttttatttcattgataacttgttcagcatttaatttactcataactttaataggattcggtgtttcatcaattaaaaagtttactaatgaagcaattttcttcccgctaataatctcaaattcttttatagacggacataacattaaaaacttttctctagtagccttttcctcgaccttttctcttaacattgctattttctttaaacgttcattcacatttatcacctcatacattcagtaaattaacataataaagcgtatcatccgtttgaaaatacataaccgatccacagctataataattaacaaattgaatcggctctccaaaatgttcatagtactttttctgaatgtcacttaatttattttttcgaaaaaaattcatttatgctctacaaccctctttctactatacaaccttgttattaaagatagatttcttctttccaactactggatttagattgaactactattagattttcactttcccattttaaggtacccaaaaatcttgcatacaccatttcatttcctacttcttccaccaatagttgatctcgaatctttaatcccttttcatcatacacttcacatcgtagttggaaacctttaacacgatgaattccttttaatatcgctatcctcttacggcttgggcttttcttaggtgtcttcccaactaaaaatattccttcatagttttgcttcacaatttcatctaaagattcctctatataccctttaacaacagatgatgaaagagtagagttttcttcaagtccagggacaacatattggcgtactaatttgcaaaactctttgtatttctcttcaactgaatttaatgctaaaaagtccataaaatcatatggaacatatatacgaatttcacccaaagctctattcacttcatatgaaatatcagtgttttcgttagctaaacaaaagacagttactttttcaatctctcttaatcccatctcaaactcgctaactttctttgagaaaattagctcaaaaattctaatttcatgtacaagcaaataatgttttttaggacgtttttttttccaatcgtaaaactttacttcaagcaatataattcactcctttaaatttatcaccatgcatcggggacctatgataccttttattaatttattaaactgtactcctttttcattctatcttatctatatttttaatatgctctactcacaacgcacacggtgacataacagccataaatacatcacttctctcacctggtgctatatacactccttctgcatctaaatattcaatggaaaaggctgctagctcatacgccatttcttgatcgcattcaaaaagtggatttataaaaacctcacttcctgtaatcttttgtaaatctttcaaacagttagacttacttcttgcataatcagccacattctcattagcccaagaccacatccaactgttactcttttcagaccaagaacctataaaaacaacactaaattcaagtaatacttgaccattttttttaaactgtaatatacattgatcttgatcataccaatactcatcaaagttatagatattataatctgaaatgaatttttgctgtttactttctaatttgtcataacacataacaagataattttcgaattgttcatccgtcattgccaattatcacacgctcccttccttcaagatctccgctacaaacaatatatcttactctctcaaaacctatataaagtgaaactttaattagcccttaccaattgggcttttaccagtagcccccgcccacatatcatatacgtttctattactaagatatcttaatatatacaaagaaagaagaacttatataagcccttctttccgtaaatagtttctttacttcgtctaatttattttatcacgataaataaattcaacattacacaaatgcaccccaaccatctgtatatccaccaaactcttcacccagtttattcaattccttttgcatctctacaatatcctcataaattaagaacatttctttagaacaagtacacgtccaatcttcaaattcttcattataatctaattcacaatttaagcccagctcttgtagtctgccaattattttttctccattaccttgatcaggaattgcaataaagaaatctactatatgttttttattaaaatctataccttgcttgtataacatatttaatacttgtccatcttcatcttttgggaatttcattatttctccccttttctatagcatataataaaccttcatttggaacaaaaaatattccattacttaaagtcctctttacccgttatttttaagttttttccattctgtatacctaatatcaatcacttcttttaatttaaagtaattttcccaagtatcttgcacttgatataatgtatcacactctaaaaatacatcatcataatcatctaaatataaacctttttcaaaatcaaaataatctattgcaaattgattcccttcatcatttaacatgtcatcgcttaaaaccccatcccagaacatataaacttgagttccagtcatttttctaagcttaaatttattaatttcctcttcagtctcttctaaaaattcatcactaaataaattattatcaataatccaacctaagaacattccagtatgtacaaatgcttgctccatcggtaattcttgtgggaaatctccttcataatgatatttagctttatcgtaaattattgtttggaacaagattctcactcctatttcacataatataattgagctcaaataaataattctttgatacactttttaaaaaggtaagttgactagactctgtggggtttttgcttccaaaggctaagtctatcgctactgctcaaggttacagtgcaccatcatcactcgcaggcactatctcaaaccggctaaaattcgatatgggctttccagtattataaaacctgtaaataaaaacccctataagttacattcgaagtttgtatctaatcataaaaacgtcaaatgtttccttctaggggttaccaatatttatgattaatagaaaatctagagtttaatgtttttccaaccagaaaaaccagatataaacaattaaccccactataatcacgaaaatgaataactaaccttgtttatcctagattcatattagaaagaaagttttcaaataactccaattcaaatttatccctcgtctttaaatactctctctttttctcaatgatttgttctaatatctcttctttatttaataacaaggctaatccaatagcattttgtgctcgcgtcccatcaaatattgtccctattaatccagcctcatcatcatctcttacacataaatcaaatacattttccatatctacatacttatcaatatatggaatgaagtattccttaacttcttttaaaatatccatagtaacaggtaaaatatcttcttccttttcaacacgccaccttttttgctctctatagactaaattccctaaatcaactccaattgtataggtctcctttttctctctaattgttaaaccgtcagcccattgatttttcatattttctaattcatcaaaacgaattcccacatccaccgtcacatcaaaatcttctaggtgattgataaaggctaaatgtataccgatttttcctttatcaaattttttcaccaggtcttgttgtgtagttatagtcttataaccgtcttcttttaactcttcacctagaccttgcagtagctttaattttaattcttttttgttcatataattccttccgctctctattttgatttgtcccacgaggattagatacatgtcctatcctatatataaagaaaaaagagcctatattcgctcttccttcatatacacatttaacaaatgcatctttctaaccactaacttttctggtgatatattaatagcctctaaaagcaaactgaatatacaagtatgtaccaacaccataaataacaaaagcaactatagtaattagccaattttcacgagttttttgtacatacttcgaacatgcccaaaaaagaagtaaaataattaattgaattgcagtcacttttgagacagcaattatagtagtttccgtaacaaatactacccatgtcccgaacaacatccgaatacaaaaaataatcgccccaatacgtgtttcagtatattgtttatttatatttataaaaaatatatcttgcaacataacagttaatgttaatacaactactaaagccaagatagaaatgaattctaaaaattctataagcacttttagtctcccttttgacatcattttattataattttcattaaagattcttactatcatgtaactaggtctacaaataccctctcattatctatacagttttcgcatacataatatgaaaataacagctaagagcataaataataagtgcaatcattgtaatataccactttcctctgtacttctttacacactgcataagcccccaaaggaaaagtaatataattgattgaatcactaaaatatttagcgtccctaacagagtagctgtcatagggtaaatgatccatatactcaccaatgaacgtatagccatgaccgtagcaaagattctcctataatgagacagtcttatactacctatgcagtactcttgtaaaaatacgatagatgctactagcatatttaaaaccaaaattaataaatatccaaaaaactctatcaactctaaattctccttcataaatttatttacgatttcctatcgcatcaaaagttaacaattcactccgaagttttacaagttactttttcaaaaatactagctaatattccaataatcatcaaagagattactattcatacattcattttattactcaaggacgacctatttaaaaatccaattttttagcggacttgaaatagtcttgaaatttatcatcgatgtcctcatctttactaaaaaaaagcgttacatacgaatcccaacaaacaatttcaagttttgcttgagggtgctgaatatttggacttggtacccagagcccttcatttccatttgcatagggttctacaagcaaattattaatatcaatgtttatagacttatcaaacgcagatagtacaccccaaataaattgaggattatatttctttacgagatttgaaagatcttcacctgctatccaaactattggatgcgacattttaggataatctcggataagtttctcttcctgatgtgcgacattctccatgtctgttataagccaattaaactctttttccctaccttgaaatgagtcaaaaacggaagctaaaactgtatatttagatccatgtaaaatgaagttcatccaatccctccaattagtaacaatcgataagttagccttcttgaacttattatgtgtagataattaaacaaataccaatgaatactgttactatacacaatataatagttgttgcagtatctagcaaaatgcttacgactaggaaaattattgatttaagagcaaaagaaggccctttttctttccattgacgatagatttgcatcattgcataaattaatggaatcataccacctataatcagaataatccctattattttccccatgtttcccctccttttaaagattcgaatcaataaatatactatataatcatacaccctcaaaatatatccttatatttttgaagttattttacacatacaaaaccctctaatcatagctacactcgtattaagcgcattgttaaaagttatataatctttcattctgtaattaatggaactttccatctgctaaaaacgttgccatacagcttaacattttctaaggtattaaatttcctaagatatcaattagctcttctaatgctcttcccaaatcgtttatattgtctcgttcatcaaaacctttctccattaattcatcttctataatatctctcaatttatttattttttcagtttctatcatacgtaagtcttcataagcatttaaccatagtaaatgtttattttgtgattctaatgtctgtttcaataaaatctgcatctctttatttaatttaaacaaacttattttttcctttccttatgtattttgaacctttagcaaaagttgtaattactttaccttttttatttaaaactactacagcctgtttactagtatatttagttctaccgccactttgtataacttttttaccagttttaacaacatttaaaatggccttagatgatactcctacaccatcacgactaattgtctataccatttctttcctttcataaactcacctcgctgaaatatttttcaacacaataatgttacatattcaaatctaaatgaaataaagagtaaagtaaatgcagtttaaaaataaatacatctatcataaaaaaagaaaagacgatttcttttctcattaatgcttgtagtatcccaccccatttaatgattgataaaataagaaaagggcttttttggaatcatcggttaaacttgcaatttagttgcagaaggaacaaactgatgatgcggaaaaacgtagtatatagaagactatgtaaggagtttgtcatatgattgataacagaatttcgaaagattatgaccatgaaatagatgattctttaaaagaaattacagatacaaccatcttacttaattttcaaaaagcgattgtaagtttatatcctcatctaataccaattcatgcttttgcctatgacgcatgggatgatattgtaatgccattgttttatgagatggtatataaaacctttgcttttaaatacgggatagatattaactttaaagaaactcatacctatatgttttcgcttaatagttataaagggatacatcacatcgagtgtgttccaaagtgcacgacatttaagatttatattaacgaagaatggattgaaatggataataaaagtttgaaagaaaatgtatttgtatttaagtcatttggggatggattgcattttctaactggtggaattgaaattgcagatgcttatcgtgtaggatttgaccttgttgaggttgatattgtttctaccataacaggtcttccatctaaaacaagtatttttattgataaagagcatgtagactttgtgtttgttgcagaaacatatgatacaaatatccaaaattaaaaattttatgtaagaaagtaggaagaatatcttcattactactcatatcaaatagttgtttgaacacgctccgctattatatatacaaacttcctactacatttcatatgagaaaaagttattacgataaacaaagaaaaggtctcctaaaatatcttttaggagaccttttcttattaatagattttgtaatttaagagtaaacactcttaaattacaaaatcctccggaataaacactttcacttctttcggctgtacgtatacgaaatcacccgcttgaatgttcagctgtttgaactgttctttcgtaatttctgcttctaaatattcatctgtttcgtctcgttttaattctacatatacgatatttccgactgcgtgagaataagatacttttgctgggattgcatctacactttgtttcgtacgagagattgataagtcatgcggccttacataggctattccgtctacgtttgaaacgtgcttatgctctggtgcttctagttcgaccgatcctacatttagctttcctttatgaacgcggccgtgaaataaatttacatttcctaaaaagtcatatacaaacggacttgctggattttcatatacttcttccggtgttcccatttgttcaatgcagccttcattcattacaacgatgcggtctgcaacgtctaacgcttcttcttgatcatgcgttacgaatacgctcgtaatttgaaattcgtcatgtaattttcggagccatcttcgtaattcttttctcacctttgcatcgagtgcaccgaacggttcatcaagtaataaaattttcggttcgactgcaagtgcccgggctagtgcaatacgttgacgttgtccaccagataattgcgctggataacgtttagcaaagccatccatttttacgagctttaataattctgttaccttttcttctatcgcttctgctgacggtcttaagcttttctttcttacttttaaaccgaaagcgacattctcaaatacattcatatgtttaaagagcgcatagtgctgaaagacgaaaccgacttgcctgtttttcacgtgaatgtctgttagatcttccccatcaaatgaaacagagcctccatccgcttcttctaatcctgcaataatgcgtaataacgtcgttttcccagaacctgacgggcctaataaggcaacaagttcaccttttggaatatccaaatgaatgtctgttagtgcttgaaatgtaccatattgctttgatacaccttgaatttgaatactcaccgtaatccccctcttattggcgtttttccattcgccattcaatccagttttttataatgagtgtacacactgcaattaatgacattaacgtcgctactgcaaatgctgctgaaaattgatattcattgtacaaaatttcaatatggagcggcatcgtgttcgtaatgccacgcacgtgacctgatacgacagaaacggctccaaactcaccgatagtacgggcattacatagaatcatgccgtataaaagaccccatttgatatttggaagcgtaacgcgccaaaacattttccagccacttgcgccaagtgataaagctgcctcttcttcacttttcccttgcgcctgcataatcggaattaattcacgtgcaacgaacgggaaggttacaaagattgttgcaataataatgcctggtacagagaaaatgagtttcactccatgttcaagtaaccattcgccaagagcacccctcggtgtgaaaagtaagacgaatactaatcctgcgataactggtgacacagcaaacggcagttcaataagagagagtaatacttgttttcctttaaactgaaactttgtaataagccacgcggccgctaccccaaatatcgtattaagcggcacaacgattaacgcaacgagaagcgttaatctaattgctgaaaatgcttcttgatctgtaatagcggcaatgtatacatccatccctctttcaaaggcttttagaaaaatagttatgagtggcagtaatagaaagagagataaaaataaaactgtaatcgtaattaatacgcctggtacaagcttagattcttttttagctgatacgctttttactattttcttttctaataatgttggttccattttctctcctcctattcactttttagttcatgccttctactccagctttgaatcatattaataagaagaaggaaaaggagggaaataataagcatcacggtcgctacagctgttgcccccgcgtaatcatattgttctagtttcgtcataatcatcagtggtgcaatttctgttttcatcggcatattacctgcgatgaaaacgacagatccgtattctcctaatgctcttgcaaatgcgagtgaaaaaccggcaagaagagcgggaaagatttctggtaaaatgattttcacaaatatttgtaagcgggatgcacctaaactcgaagctgcctcttctacttctttatcaatattttgcagcactggttgcaccattcgaacgacaaatggtaaaccgataaaagtaagcgcaacgataattccgagtggtgtaaaagctacttttatatgaaacagactaaatattttcccaatccatccattttccgcataaagcgttgtaagtgtaataccagctacagctgtcggaagtgcaaacggtaaatcaatgagtccatctaatagtctttttcctggaaatttgtagcgtacgagcacccatgctattaataaaccgaaaatggcatttacaatagcagctgcaaatgaagttgtaaaactaacttgataggaatgcaacacacgctcgttcgttataaccccagcgaacttcttccaacctaactgtgaagtttgaataaatacgatagaaagtggtataagtacgaataaactcatgtacaacattgtaaatccaagcgataatccaaaccctggtaaaacacgtttcttcctcatcctctttcacctcatccccctttagcagtacgcattatttttgataaattttatcgaatacgccgccgtcattaaagtgtttctcctgcgcttttttccagccaccaaatagttcatctactgtaaataattgaactttcggaaattgagatgtatatttttctgctactttttcattacgtggacgataaaagttttttgccgcaatttcctgtcctttttctgagtacaaatattcaagatacccttctgctacttttttcgttccttttttatcaacgactttatctacaaccgctactggtggttctgcaagtacactaatagaaggggttacaatttcaaatttatcttttccaagctctttttgggataataacgcttcattttcccatgcgattaatacgtcaccaattcctttttcaacaaatgttgtcgttgctccgcgcgctcctgaatctaatacttctacgtttttataaatttggctaacaaactctttcgccttatcttcactattattatattttttcagtgcgtatccccacgccgctaaatagttccaacgtgccccgcctgatgtttttgggtttggtgtaatgacagacacaccttttttcgttaaatcatcccagtctttaatacctttcgggtttccttttcgaacaagaaatacaattgttgacgtgtatggagtggaattattcgcaagtcgcttctgccaatcttctgctaattgttttttcttactaatcgcatcaatatcataagcaagtgctagtgtaacaacgtctgcttctaagccatcaataacagagcgcgcttgacttccagatcccccgtgtgattgttttacatttactgtttgcccgtgcttctctttccaatacttcgcaaaatctttattgaaatcttgatataactccctcgttggatcataagaaacatttaaaagctcaactgtttttttatctccacttccttcagaattactagtggatgttgccgaaccacaccctgataaaagtacaactgctgataataaaacacctgtacttttcataaacgctgtcttaccccactttttcatcgttaagcccccttagtttatacaatagaaaaaggcacacaatatattcacaaatgtgaacattgtgcgccttcagtttatctgattagcttctaatgtattctattcgatttcttttcattttaattctgtaattcgcatgtgtcaacttggaatttgaattttcttattaaactaaaatattggcatacgttgagcccaatgatttttcaaatcagcaaattcttttggtaacttactattttcattccattctaatttatatgcatttactaacaccgtagccattgattcacagtccactactccattttgattaaaattaccgttcttatcactttcagagttcatccataatttaacaaataagatattgcacccgacgtaagcgttaatttcttctgttctacgtatgtcccctccttgttggtcatatacaggtttaaatatatggcaccacagcttaatcaatacaaaaaaaatgaggcaaccacctccaaagatggttgcctcatttttacacttgcatcgctttctctctcaatgctcttcttaacaacttacccgtcgtattcttcggcaattctattaaaaactcaatgcttttcggcactttatatttcgctaaatgtaacgtacagtaatgcattagttcttcttctgttacgtttgcttgcttcaaaacgacgtacgctcgcacagcttctcctaagttttcatcaggaacaccgattacgacaacttccgctactgattcgtgcgtatataatacttcttctacttcacgagggtatacgttataaccgccaactaagacgatatcttttttacgatccacgatatagaagtaaccttcttcatccattttcgccaagtcacctgtatatagccagccgtctttcaatgtcgcagctgtatcttctggtgcattatagtatcctttcataacgttaggtccgcgaacaattaattcaccgactgcgccgacaggtacttcttccccaagttcatttacaattttattttctacatgccaaatatttgtgccaattgatcctggtttccgaggacgatctagcggattgaaacaagtaactggtgatgcttctgataaaccgtatccttctgaaacaataacgttaaaacgtttttcaaagttttgcagaagagcaacaggcatcgatgcaccaccggaaatacaaaggcgaagcgtcttcacatcttctgcgcttgcttcttcaaataaatataaataattgtacatcgtcggtacgccagcaaagatcgttggttcgtacgtgcgacaaatacggaatacttctttcggactaaatttcggtaacattaaaatcgttgccccgttcacaatcggtgcatttaccgcaactgttaaacagaatacatggaacataggcagtgccgcaacaacgcggtcatcagccgtatattgtaaatacgacgccacatcgttcgcattactatataaatttttatgtgttaacatagcgcctttcggttttccagttgtgcccgatgtgtatagaataaccgctacatcttcttcatctagttcaggaccttcgtaagttgtatctccagtccccacaaaactagtaaacgttttcattttttcggtttctgtatggttaaaatctgatgaggtttcgcatatgatgatgttttctaatgaaggaagtcttgttgtaagagattgtataacaggtagaaggacgtcgagtacgatgattgtttttacatctccattttgtaaaatataatgcatttcgtctgctgtataaattggattaactggaataacagttgctccggctttcattgttccgtataaaccgaccaaaaaatgtggtgagttcccaacaactaatgcgacattgtccccttttccaatgcccatttctgctaaattgctagaaaaccttgtgaccattttgtttaattggtcatatgagaccgactgatccataaatatataagccggtttttcccccttcttttttgccgtttcagccaaagattgaacgagattcacaaaaaccccacctttataaaatttagaatatttaaaaattctaaattaattatattaaaagaaaattaaagtggcaagtgatattctattaactgcatatagacagatcaccttctcttagtttactttggaaaaataaggggattttatttacaagtaatttataacactagaccaaaaatcattttaggataatatgcactcatcttttctctaagtttatcaagttcctctttatgtaacgtcgtatgctttccaaacaagttaagagcgtccgctccatcttcatgaaaataaactgtaacatataatgccggtaaccctatattgtcttcatctattgataagatgacatctggtgttttattaacagtgctgaatgtttcatttcttttccacttcttattttgaaacatgtcttgtatatcatgtatctttcgtttgttatctgtatgcgtaaaatatataacattatcctcagccggttttccgatagacaaaattgtacgacttgagggcgatccactgttacacgctgtcattccgacggcgaagctgagtaataatacaacgtacattacccttttcatttcgattcgcctccttttgaatatatatattcctttacgaggggcaaatgtcctgtgattttatgttttgtggtaaatgaaattatatgagcgatttttcagttatatcagcgccgctcgatttatatcggcgatttttcaaatatatcagcgcaactcggtttatatcggcgattttccaaatatatcagcgcaactcaatttatatcagcgatttttcagttatatcgacttaccgacaaaacctgacaatctacgcaaaaaagaaagaggctgcccgttatggaagcctccctcatttttagaagaataaatgtaagaaatcttctgttgtaatgttaccgaagtagcgtgcgatatctacgccttctaaagctgcagtgaatgcatctttatcgaactgaacgcctgttagacgctcttcgatatcatgaacatctagtgaaccgaagaagtcgccgtaaattttacattctgttactgttccctttttcacttcaagacgaacgtcaacttgtccaactgggaagcggtgtgaatgttgtaagttgaacttcggtgattttccgtagttccaatcccaattttggtaacgttcttcagaaagtttatggattgctttccaatcctcttctgttaattcatacgttgggatttctgtttctccttcgaaaattgtttctagaagaagttgtctaaactcttctgtcgtcatttcttcgtttaagaactctgtaatgttcgcaacgcggctacggattgacttaattccttttgattgaatcttatccatttttacttttaacgctgatacgacgtgatcgatttcagagtcaaatagtaacgtaccgtggctgaacatacgacctttcgttgcgaactgtgcgttacctgaaatttttctaccttcagctaaaatgtcgttacgaccacttagttctgcatttacgcctaatttactaagcgctttcgttacaggttctgtaaattttttgaagttgctgaaactgtctccatcatctttcgtaataaaactgaagtttaagtttcctaaatcatgatatactgcgcctccgcctgatagacgacgaacgacatgaatacctttttcttttacgtaatctgcattaatttcttctactgtgttttggtttttaccaatgataatcgaaggttcgttaatgtagaacagtaaatatgtttcgttaatatctaaatttttcacacaatattcttcaatcgctaagtttattctaggatctgtaattcctttattatcaataaataacatcgtatcacctcatgagttccatacgtagccactatgcgctagcgtaatgtggccactgaaaatttgttttgcttctgttactaaatcagatgggttgcctgtatgcggtaagtgcgttaataaaagttcttttacattcgcatcttttgcaatacttgctacttctgtactattcatatgccctgcttttgcagcctcttgatgtgcatacatattacactcacaaatgaaaagatcagcatctttcgtgaatggaatgaattcaggaatataacttgaatcagcgctgtatactacagcatcatctccagctgtaatacgcatcgcaaagcatgtaacaggatgaacagtttttaagaacgaaatcgagaatggtccaacttgaagtgtttcttctggattgtacgcgattcctttcgtatgtggttcatgcgttaaagaatggaatccattctcgtcaaaggtatggccgtatattggtaattccggtagttgccccttcgccccgctcataattaatctcgcatattgcaataccccgatatccgcaacatgatcatgatgatagtgtgacagtacaactgcatctatatgagatggtgttatatatttttgaagctgtgctagtacaccactaccacagtctacaagtaaacgaaaaccatcgtgttcaaacaaataccccgacgttgcttctcccgcttctggaaagccgccccaaaagccgacaacagtcattttcatatgtatccatcctttctaaaaccgagtagaaatgcatgttttacttacatcctacattgttaactataatccatttcctaaactttttcattaattttcaattttgttataaaacagttgttgacttttattttttgtactaatacaatgatagtaagaaatggaaatggagggattgacatgatcgatcaaccaatggagtttttcagaaatttaccgacgaaaacttgtgcgcactgcgggaaagaaattgatgagcaacacgaagcataccataacaaatgtgacgattgcgttcacgaagaatagtagtttgtgaacataaaaaaacctagcagacatagtctactaggctaataacatcttatccttcatcgttgaacctttcaccaagagctccagttcaaactcatacaattctttttttcgataatttttcgtatggattttatccatcatcaggtcgacaacttttcgggccatttcatcaattggctgttcaattgtcgtaatacctggttctgtaatctgcgataatatttgattatcaaaaccgataacagcgagatcatctggaatgctccagttatggcgtttcgcctctgagataattccagctgctacctcatcgcctcctgccaaaatcgcggtaggattttttttgtcctttaatacttcatggaatattcgttttccatcttcccaagagaaagcgttttcaagaaagtcaatcgcttctacttggcggctcttctcagttattgcacgtaaaaagcccatttttcgctgctggctaacgactttggtttcgttaccacggcaaaaaataagattacgatatccttgatctaacacatgcttcgcagctatgtatgctccttgcgcatgatcaaacttcactgttggaatatttgcttcctcaatatattcattacacaacacgattggaccgtgctgtaagtatggctctacatcttcccacggattttctagtgaacatagaataatcccatctacttgtttcgtagataataattgtaaatactccatctctttttccggtaaatatcttgtttgacaaataatcagtttatatttatgttcagaagcagcaatctcgattgcttcaataaatctactgaagaaaggatttgtaatccttggaactagcaccgcaattgtttccgttttttgtttacgaagccttctcgccgcagaattaggaacgaagcctaaatgcttcattgctaattgaaccctttttttcttctcatctgaaacatatggatgattattaatcaccctagaaaccgttgtccttgataaccccgctaatttcgccacgtcctctatagtcgacacgaaattctccccctttgcatgaaaacgttttcttaaattgattatatagtatattattggaaactgcaatatcggttgttatgattttactatattaatattatacataggtaaaagtctgttaatgcatgggcaatatactgcttttagaaatttacgttatgtacattccttttcttaataccatatatcctttattcaatataaaaccccatcaatacgtcatctccatatgatccatcttcatactttatttgctttcgttgtctgccttcttctacaaagcccatacgtttgtacactttaattgcccgatcattaacagaaactacacctaaacaaattttctctaaacctttctgccctttcgcccaactaataagaaattcaattaatttcgtgccgatgccttgattacaatacgcctctttaatccccattcccattgtgcctgcgtgttgtaaccgttctagttcatatcggttgaaaattaaaaagccaactaccttcccatctacttcatacacgatataaagattacctttctcattacttttccgtatcttttctctttctgcattcatatcattcggtaacttctttggggatactatgaaaaattttgtagtagtttccgataatataatttcttttctaatattcataattgcttctgcatcagtctcttttactaaccgtatcattaaatcacctcgtactttttcttttgaaaaataatattacaactataaaacgcccaatatgcaatattacatattgagaatctttttactcttgatacaatattcatacatcaaaataaaaggaatgtatgcaatgaatccaatcttaacagctgcaaaacaactattacataaagaagaaaaggttttatctactttaaaatgttcacttactggctatatgattacgcataaagtcccgtatcctggcatgttacttgctactaatcaaagacttctcttttttagccaatataaaaacacattcattgccgaatttgattatgaaaaaattctatccatagaaacgaagagaagaatctttgacaaaaaaataatattttactatgaagatgaatatataacgcttggatacattacaagttcgaatgttgaagcgttcatagacttactacaaagaaacagcaagactagcacaggcttataatcagcggggatcccctcgctgattcattattttaactcctcccacttcgtccaaacttccctcccgtttatacagtacatattatcctctctattcataaacccctgtacaataaattcacgtctaattgtacaaaaatcatcatgatattgttttataaatgtattcatttctttttctgtatattgattttcagcatttaacttgctaattaaatgctctaacaatactagttttttcttcttttgacctggaatcgattttaaacgatcctctttatcgaaaaagttacgaatggtcgtatcccggaatttcatttcactttcagtcattttattgtcctccattaatttttatacaacaaaactttattgtttgtccttactattcttcttcattctttcacttacaacatccataaagtaatacccactaataagcacatagtaaactacaagtattcctagtgcatctttcatatttatatatttttctttatgaaataagataggtgaaagggcgtaaacaagaaagatgattagcggatttaagataaaataataagtaagatttcctttcatcatatcaactcctctattctagttttctctgtaaattgttgtaaatccttttctttcgtttaaactgcacatgcgatatggtgaaattaaggagaaggatgattataaatgatatttcactctaaaattgataaatttttcttattcattatcttttttgctatttttcaccataggtgcttcaacactgcttcctctcttattcgataatgaagctactacgacagacgtatatattctactacctattttctttgtatcttctggtttcctattatggaattccttttcatttttactcctctcacccacactttcttcaaactgacttaccacttttacatttgcaacctattattcaaattaacaaattaaaaatggtaaattatgttacaattaacttatacatactttggagggtacatagtgaaaaaagctattatagtattaagcattctatatcttattttaaccgtacatacaggagctgttcttttaggaaaagaagattatagaagtgctatcaatacattaaaagaaacgaaagaagtctcttcatttcaatctgcaaaagacggtgtgattttattaaaaggagcattaactactgcgcaacctattacagaggaaaaacttcaaaataaagaattcgcactccttgaaattaatacgtataaacgacgaaaagcaaattggataaacattgatacagagcaacatattgcaaagcagctcttactaaataatgaggttcttcctgcattaaaagaaattcgtttttcgatggaaccaattacactgtcaggaaaagatatttccatcgaagattactcactaaaaaaggatgatactcaattaacaattaaaagtaaaggataccgatatacgggaatagaaaacaaatcagacactcttatttttggcataaaaaagggggatacccttgaagggtatagtggttctgaaattctaataggaaaaacaaaagaggaaattgctagtaatatgaaactatatacttttgctgaaaaatatggtccatttatttggattgtagctacaattattcttataagtatcgttatatacttgttccgtaaaaacagaaaaacaaatgaactttctcaaccaatgaagtgaaactttaatcagtgggggtttcttcatcccccactgattattagccctcaccaatcgggctttaatgggcagttgatccccacctaacttctttgctttcgctgaattttgaggtggggtcttactgcccatcattaaagcgggataaaacaaaactaataaaaaaagcaccaaaaaggtgcttttatctacgcttcaaccgattgattttcaagcacatttttaaattttcgtttgtgcatcaaagttaaagaaacgattgttccaaatgataatacaacgataaaaatcatgagtattcctatgtttttccacatgaagtcaaagtctccactcgatacgactgctttcaatcctgatacagagtatgtcatcggtaaccaagcattgaatggttgtaaaaacttcggaatcaattctagcgggaatgttccggcactcgttgtaagctgcataattaatgtgatgatggcgataaaacggcctgcatcaccgaatgctgttactaaacattgaattaatgcgataaatgctaaacttgtaatgatactaaagagtatgaagtatggaatgctttgtacttctacacccaatccgaacagtaatataacatctgctactatcgcttgaataataccaactgatagtaaaacaccgaacttactaataaaccaactaaatcctgattttggaacgcctactgtatcacgtaatgggtatacgatagataataataatgccccaacaaataaaccgagtgataagaaatacggcgtaaatccagttccgtagttaggaacttccgccattttctctgtcttcacttttacaggacttgcaaacatatcatacgttttatccgttccttttacttccccagttttctctgccccttcgccaagtttctctgcaagttcacctgaaccgtcgtttacttttacgagaccatctgttacttttcctgagccatctgctagtttatttacgccgtcgattagctgggttgagccatttgacatttgatttaggccaccatttagagtacctaagcccgttgttacttgaccagatccgtctgctaattgatttactccacctgccatttgatttgctcctacagataatgtccctaaaccgcctgttactttactcgagccatctgctaattgatttactccacctgccatttggtttgctcctgcagataattgacctaggccgcctgttacttgacttgagccatctgctaattgatttactccaactgccatttgatttgctcctgcagataatgcacctaaaccgcctgttactttacccgagccatctgctaattgatttactcctgcagataatgttcctaaaccacctgttacttggcttgagccatctgctaatttcgttacacctacagataatgtccctaaaccgcctgttacttgaccagacccatctgctaatttggatactcctacagataatgttcctaaaccgcctgttacttgaccagacccatctgctaattgatttactcctgcagataattgacctaatcctgctgtcacttttccagagccactttgcaattgcgttactccatcaattaattgaactgatccatcttttaatttatcggcacctatttttgcattatctaatccctcaccaaatccatgaaacttactaacaaattcattttgtgcgctcgttagtttctcaatagcacctgctagagtttttatccctgctggatttggtaagtttttttgcaacccatttgttgtttgatgtatttcaccttttaattgtttcacttcttcatttaatttatttgttccacctgctactccggcagctttttgctgaactgtcgctgtactttttacagcacttgttacgaatggctgtaactgctcttgatattcttttggtaaactttcaatttgcttttgtaaattcgctacctcttgtgctgcattttttgcatctcctgctgttgattgtgtaagttcatttaactgatttacattcgccccagctccatctattttttcatttactgtattcaatatagaaggaactttcgactgcatttcctctaagcctgcagcagacttttgtacgttactatttaactcttgcaatcccttttggatcgcttgagaaccttcctctaattggctttgcccttcaacaagttttcccataccatttgatagatccgttgttcctgtttttaattcaccggatttacttactaatttgttcaagccaccggtcactttctcagatccatcacgcaactcacccgttttactatttaacgtatttaaaccgtctgttactttgcccgatccgtctactaacttcccaatacctgcattgctatttaatgcatgtaaaccatctgttactttgcctgatccatctactagtttcccaatacctgcattgctatttaatgcatgtaaaccatctgttactttgcctgatccatctactagtttcccaatacctgcattgctatttaatgcatgtaaaccatctgttactttgcctgatccatctactagtttcccaatacctgcattgctatttaatgcatgtaaaccatctgttactttgcctgatccatctactagtttcccaatacctgcattgctatttaatgcatgtaaaccatctgttactttgcctgatccatctactagtttcccaatacctgcattgctatttaatgcatgtaaaccatctgttactttgcctgatccatctactaattttccgatacctgcattgctatttaatacgtgtaaaccatctgttactttgcctgacccatctactaatttccctatacctatctgcatttcacctgttttgctatttagtgtatttaaaccatttgttactttgcctgacccatctactaatttccctatacctatctgcatttcacctgttttgctatttagtgtatttaaaccatttgttactttgcctgacccatctactaatttccctatacctatctgcatttcacctgttttgctatttagtgtatttaaaccatttgttactttgcctgacccatctactaatttccctatacctatctgcatttcacctgttttgctatttagcgtatttaaaccatttgttactttgcctgacccatctactaattttccgatacctacctgcatttcacctgttttactatttagcacatttaaaccgtttgttactttgcctgatccatctactaatttattagatccatctgctaatttctgaactccatccttcatctccccagaattcccttgaagtgtatgaaggccatccgtcactttacttgaaccatcatgcagctcacttgatccgtcgtgtagtttatttgctccttccgccccatctgctaatccttttgagacgtcttgaatggaatcaaacattttctctgcatatgttttcgttaacgtgcttgatacttcagttttaatcttttcaatggctgttcctccaatttgtgaagataagaagtttaagctttcgtttggaatgtactctaagtttaatggctttggattgtcttttagtaacgttgtagcgttacttgagaagtcatctggaatgcgcactaacatgtaatactttctagcttccattcctttcttcgcttctttttcacttacgaactcccatttaaaacttttattatcttttaaattatcaacgagcccttttccgacctcaattgatttcccatcaaatactgcgcctttatctaaattgactactgcaactggtaagtcatctaactgtttatacggatcccaaaaagcccacaaaaacatccctgcatataaaattggtacgaataagaccgcaataattggaattaatatttttttactttttataatttccgtgaactctttccgaagtaactgcttccctttcataatttctcccccttttataaaatgaccaaaatgttcatatagtcatttttacccaaacaaaaaggctatacttgttcatacatatgccttatccctgaatttattactatgcaattttttcttattatgattataatttttctatatccccccttaacttaaatatatgaccgaattgttcatttggtcatttttttataaaattaaaaggattatcttagtttgacaatccttttagtaaataaagttcaaataactctgcaattttttctttttctagcggttcgtgatttttttcccaatcaaaaataagcgatacatatagacgaagcataataaatgctgtaatttctggatcacatttgctaatttcacctttttcaatcgcaatctttaaatacgattgaataacagaaacgatttccacatcaacttgttgcatcacttcttgtacttctttcgttcccatatcgcgctcttcttgaattaatttaatcatgagctgatgttcttttctaaattccaagatgctatataatgctctatgtacattttcaaaaaatgaaacatctgaacgaattgcactttctgcaacttgcttcatttctgtaattaaattagaaataatttcaccaaataactcttctttatttttgaaaaaagtataaatcgttcctttccctacattcgctaacttcgctacttgatccatcgttgttgctttatagccgaacgctgaaaaagactttgttgcagcttcaataatagaacgttttcgatctatcgccacattgtcacctccaaaaatgaccaattggataatatagtcaatcagtacatctttgatattaccacacgcttacattctatacaagttctctttttattatttccagtataaaaaaatttcagtcagtgtatatcatactttccatagtttatcagaagaaaagagaaaaggaaaagatgttctagagatatacatcttaagaacacctttttgctatttcaacatagaaagcataattttctctaattcttctttatttacattcttatcgaatactgcttctcctgggttctctaaactatgattaataataacgatttggtatgcacgatttttcccttttgctggaacaatcatcttcataccttgtaaattcctatccgagttatgagtcgcatagaatatttgattaccttctaattcgtactgttcaatattttcttctacaacaaataaaccatggaacggatctttactttctccaaatacttgtgattgataagttgtatagtttccttttccgtttgtatactctaattctataattaactcgggtcttctcttaataaaacaacttaccttttcatcctttagatcgtagccttcaattgtgtaagttggcttcttaatttgaaaatctacatgttcctgcgcttcctttaccgtgtaatttaaagattcttccactttgtcattaaacggttttgattgatcataaagtgcatataatttttcacgatcagtttctgttaaacgttcttccctaaaaaatattgactcgtagtcagaatctctcggagcaccttttttctgtatattaataatttctttatacaattttatgtactgttggaactcatctgttgttaaagccttttcagctaaatataaataatctgtcttattttcatacactcttgctgaatacctatattctttttttgcattttcttctgtaccaaacagcatatctacagcatgttggaaagcatcctttgactgctctactttatccttttgtttttctttcccttccgttgcacgtgcgttgaataaagaaagggatgctatagcaactatgacaataactccaagtaaagaaagacgatacgatttcttttggaattttttaatcataatgattctcctttttagtgttcgtttatttctacttaaatttgccaggcttggtaattgataggaatagtgttctaaaagggtaataattgtatgaccgtatgcaatttgttcctctttatctataaaagtaagtgcatatgcatcacaggctaattcttgatcttctcgcatacaaaaataggcgtaccaaagaattggattgaaccaatttaataggattaaactgtacataatccaatttacagctacatcgtttctcttaatatgagctaactcatggtaaaagacatattgtaattgttgttcatttaatactttcatatgtttttttgatagtaatactttcgggcgaaagaaactaaaaaccgttggacttgcaatctttcctgcaagacgtaatgaaactgccttcttcattttcatagactgcttacagcgattaaacactgtagtgacctgttcgtccgtaatatccggttgtttctttatgtaagaatataaacgtctatttgtaagaaacgtgatggctgctaatatgattaccccagctagccacacatacaaagcaagtttgtataaagaaaatgtagtctgtttttccgaactgacttttacttccggttcgctagtttttgtcaccattttagaatttgattccaattccacttttcggtcgctttctatgttcactatattctcagtagccggcatattttttggaataacttccgatacgctagaactataagaaagtaatgagtaaatgctataagagctatctggcgaccacggtaaaaggagtcttatcattaatacgatccacagcatatattgccaccggggggttaatttatttctgaatagaacttttatacacaaaataaatccgactaatatgctagccataagtgacgtttctataagccaatcaaaaaaatgaggaaggtatacatttataagcgtgtttatcatttttatcgatccttcctcttattctcctctgtcttctcatctaaaatgcgttttaattcattaatatcttctgaagataatttctcctcttttaagaaattaacaagtaatggcttaaacgctgcaccgcaaaaacgctttagtaaagatttcgtttccacttgcaaataattatcttgtgatactaacgggtaataagcgtacatacgccctttatcttgatggtaagaaacggcttccttttgcactaatcgattaattaatgtgcggattgttttcggtttccagtccattgcatcttccagttcttctataatttcattcgctgtttgcggagaattcgaccaaagcactttcataatttctaattctgcttcagatattttaggtaattgatttgtcatagtatatttcactcctaagtattacatttgtaatctataattaagattacaaatgtaatacttaattgtcaaccatattttagaaaaattaatttcagctaaaccttacttaccaacaacaaaattcctctttttcaaataatcaaataaaaaaacaagaaaatctttacaattaatagtaatatagaaaatagacaagtttatcaaaacagtggaggctttttcagtcatgatgcgtgcacttcgtttaaatataaagcaagctttttgtaatcgtgtttctttaattattatgtttagtggactagctcttatttttatttaccattattattatgtaattcgttacattggggatggaacggatgcgtttgtaacaacagcttttaaatggattggatttcgcgacaatgaaatggatgtttatttattattaatgcccgttattgccagtttcccctttagtacaagttacaattcggataaatcagatggttttaaaccgtttgtaagtaaagggatttctttgttcccttattcagtaacgaaatatattgttacattcttttgtggcggacttctttatacattcccgttcatcttatcgttattattttgcaaattaaccattccagacggagaaccgacggctggttcaggcattataaatgataatgggatgtttgcaaacttatattacgaatctcccctcacttacattactgtatatatcggaattaattttttatttgcaggtttaatggcccttttaggacttgctgcatctgcgtggtcacaaaaggactatatggcgattcttttcccatttgcagttgcctccattccatacgtcctgctaaatacgatattccctacaataggcggagctccttttcatttatatgacccaaaacaacctttgcatggcatgtcgccgtatattttgacaatacaatgtgcattcttcctcctcgttagcttaatcatgtatatacaaggagtaaaacgtgataaaaaaaaatatagaagaaggttgcaaaaaagagagcggtgtagaaaagcgtttcaagtataataaaaccctaatttccttactatattggaaattagggttttatttactattcacttacggtgtaccagccaatccccataaaataacaaccgctacaaaataaatcgctttaatacctacaactaaacataatgaaacaattgcatatttacttaattctcttcttgcacctattaaagtgaaaataaccgccaaactaaatgttatataagaagctgctgtatgtattaagttatacgtaatatctagattgcttgtaagtcctgttatatcagctacaaactgaagcatgatgatcgtactaaaaaaaattgcaaactgattcattacctttccatttatttgtaactgcattgttgtcccccttattaaaaactaaatattcaatcaattttatcgttagattacaaaaaaaggaatcatctctttatactattctataacgatgcaaaaaaagaacgcttagtcacctaagcgttccccactttaagaagccttcttcaaatcaatttgagcaagtactgggtcgtggtcacttacacgtccgtgttctttcataatgtttgagtttaagtgtactgggtctacaattgtgtgtggtgcgatgttgtttgttactaaaatatgatctaacacttgtgcatttccttcgtgaatgtacgtgtaacgattctctttcggcactgtgtttaacatatcttttaagattgttccctctagtgtttttagtggtttagagaattcgaaatcgttcatatcacctaacacaacaactggtgcatttgtattctttttctgaattccttgcacgaaataatttacttcttgtgctaactgaattcgtttgtcttcactctttaatacgagcggctgcacttttccaaatggcgttgcatctcctagttttgagtttaagtgatttgcaacgacaacaatgttttgtccttggaacgtaaattctaccgctagcggtttacgtgtactttcaaacaatggattttcgtctccaatacgaacaacattcttatcaagtaacttcggtaccgtcgctaatttcacgcgtgatggattatagaagaagccgacgcgaatattcgctcctggtgctcctccatcttgattattgtttggagcgatttctacatactcatacttcggtccacgaatttctagaactgcatcaatgatacgttttgcgcttaatgacgcatctgttgtaccgtcattaattgatccgttattatcttgcatttcctctacaccgataatatctggcatttttaaattgtatttaatagaatacgctaacgcttttactttttcatctgttgtttcttttttattcgccgagaagttttcaatgttatatgtagcaaccgttaacttatcaagacgtggctgaatatttgcccctacttgcttaaatccaccatccactacagctggcagttctgttattggcgaaatacggaaagaaccgtaatcatatcctactacccctgttatatctccagtaaaagtatctcctacttttgctacataatcgcgaggtacttttacagaaaggcgctctgggtttaattgattttcatctaatagaggtgtgccatattgtgttactattttatctccaccattttttactgttacatataaatttccgtttttctgaggtgtaataatttttggtgttggcatcgtaacacgcataccttctatactttcatagaagtcgattgcatcttcatttggatcaaataaaccaaatgcatcattatcaataatctggtccgggattttcacaccgttttccccaagtacaatcggtgctggcaaagattgatcttttgcgattacagcaacgcggctcgctttaatttcagtcgtcgttaagtctgtttcaaatcgctctgcatatcctggtccaacatattcttctactactccatcaacttgaataagatctcctactgctacattcacatcttttttatatacgtacataccttctgaagtagctgggtcattatctggctgattatcttctatataaaagccgtttttatcaagcgctgtgacaacgccttccacattgtttactttcttcccgttgtaaggagacatatgtgatttcccttgaatgtcatgaatacgaacctgttcattatttacgataataaatgaaaatgtcgaaattgctgaaggagtaagtccttctttttctgcgattgctttcactacactattttcattgactataatttgtccattataacgaacgcttttattagtaggattagagccatctaacgtatagtagattgttgcgccttctgtattcgtcgttaatgttaccgctgttcctttagcaacttctccaccgttcggtgaagctactacatcgctaacacggttttgtccttcaccttgaaacttataagctgttactgattttagacctgggttactaaaatataattcaagggtcccagtcaaactaactttcttcccgatattttcagggtgatcttttacattcactgccgttctcacatcacctttcggtaactgaacgggcatgattttgtctggattcgtttcgtttggcgaatctgcaattgctacgtttgtatcatcaaacttagctggatccttcgtatatttagaagaactttgcgtatatccaacaatatatccttctactatccccttcgttttcccttgctgcttaaatacttgaattgctttttctactgacatagaagcagtttcttctgcttgcgctaaagttccagtaaatgaaagcaatagcaagaatgataaaaagacacttaacaatttcttcacagccattttcctctctctatttcatattttctcagcatttctatcataacaaatgattcgttatatagaactatatttcgacaaattttacaaaagatttatttaatttacaagctttcaaactataatacaaaataataattttacaccttctacaaatacactctataatgttagagagaaaacagaaaatatcgaaagtttattggcatgtaaaatggattcatttgaataggagtgattggatggaagtgcaaacagaaacataccgcgcagctatgaatggaacattagaacgtcatttttcagatatgattgccgttataccaactagaattacaattgagcagttaaaacagcgactagaaacgatcgctactaaagttgatgatttaaaaattgtttatagtgatgagacaagccttattgttgaattacatatgggtgaaacagtcataccgtatgaactgcatattgatgaaccgaacgatccagaaggatataaaatgtacaatagacaagatgctacaatcgtagatcgtaattttgaagatgcagctttcggcactgaaattttcactcgtacgctatttgtaggcgatgtactggactgctttttccagcagttacagttcttatggaatctcgccccagatttgttatttgtaatcgattcaagtgcagcaatgaaagtgatatctagaagctatattgaatatcacgttgaaaatgaattattacctgacattcctgacttatacgttattcattccatttatgaagacgataaagacggtgagcctacgcaatattggtttcatacacacggtcttttaagagcaggcgtaactgaaatagagttaattattccaaatcgcatttcttcctactacggcattagcgatctctttcaaacatttgctaataatgccgttgagaatggacaagtccctataaatgagcctatcgttatcgcacatagtcagcaaggttctatacatacagtcgctgttccgtgggaaaaaggattatcttatatagggcataaaacgagtatggaccaattatcttcaatcgaggatgaagaagtgaaactacaaccaatagatgcacaaaatacattcttaggcggtatggatgaccgagatgaataccatcaatctccatctgttctcttattcaaatttaatacttcagaagaatatattgaaagctttttccaagaacacgaggaagctacagggctcatgttctataaaacaaatagtgaaactgatcgtatggcttacaatgcgaagaatactttcgggtatttcagcaacatttttcacattgaacaatcaaatgaagattttcgtttccttgctaaatttggtgtatcctacgaagagggaaaaagtgaacatatgtggtttgaaatgcaaaacattacggaagatttcattcaaggaatactcattaatgaaccatattttatagaagatatgagtgaaggaaatagttatcatttagattttgataacttaacagagtgggttatttatgcaggagatgctgttataaagccaaataacttatatatgtttattggcgaataagtattttatataataaacgaaacgccttcaatatgattgaaggcgtttcttataatttattgtgcgattaattcagcatctattactttctccaaatgagataatacacgctttgcagcttcctcaccttgattaatacagtctggaagtccagcgccagcataggagctacctgccaagtatatacctggcaactctttctccataaatgttgtgagctgtttcattcgctcgttatggcctactgtatattgaggcatcgcttctttccagcgacttacaattgtaaactctggatcctctgtaatgtccatcgtcttctttaaatcttctagtacgagctgaacgagttcttcttcagtttgttctacaaccgcttcatcaccagcacgcccgacgtagcaacgaaggagtgtttttccttctggcgttgtatgcggccattttttatgcgtccacgtacatgctgtaatggtgtaatcgctatttcgtgatacgacaaatcctgtaccattaatatcacgctggattgcagacttttggaaagcaagtgccacatttgcaacggatgtggatggaatattacggaagaaacgaaactgcttgtactgagcaaacatggacggcaatactttatgcgaagttgccactacgatggcgtccgcttctatttcttttccgttactaagagtaattgtataaccatcaccctgttttgcaactttttcaatgcgagttccctttattatcgtaccttcatgcatctttacttcgagagattttacgatagattctaaacctgttttcactgtttggaacattccctttttcggttcagctttctcttctttcggagcgagcgtacgcataccgagtgaaatactgcgatgtttctgctcaatctgatacatttgcgggaatgttgacattaagctcatttgatcaatatcccctgcataaatacccgatagtaacggttctattaagttttcaaccacttcgtttccaagacgatgtctgaaaaattgtccgagtgattggtcagatactggctttgacctcggcattaatagatcaaaaccagctcttagtttaccaattggggagaacagcccggaaaatagaaacggcgtaatttgcgttggaattcccatcattgatccagtcggcattttatgtaaccgattgtttacgaggataaatgattgaccagcttgattatttacaagttcatcgccgagacccaattctttcactaatctagctgcactttcttttcgtgctaagaaagaatccggtccgcgctcaattgtaaacccatcttttcgaacggtttgaatttttccgccaagtttacccgatgcttctataagtaatgtatcaatcggcaagtttttttcatgaatatttttttgtaagttatacattgctgttaatccagtaatacctccgccgacgatcacaacttttttcctcaagcaggctccccctttcttcttacagtacagattcttttttctttaatacaacatctgttaaacaatcaataaatgcgtccgatgcatttggcatttctggacgataatatttcgcaccaatttcatccgttacaactttacactcaaagtcgttgtcatataaaacttctaaatgttccgcaacaaatccaactggtgcatatacgaatgaagtataaccgtgcttttcatttagttctctcgttaaatcttgtacatctggaccaatccaaggatctggtgtgtttcctgcactttgccagcctactgcatagtttgctacttcagctccgcgcgcgatataatccgctgtttcatttaattgatctggatatggatcgcccattgcaataattttctctggtaagctatgtgcagatacgattaatactgctttttcacgctctgcatctgacataccgttatatatacctttcactgcatcaacccagtactggatgaatttcggctctttataccagctatcaatgccgtgaattgttaagtttccaagtttctcagcttcttcttgtgctcgtccaacgtatgatttcacgctaaacgtagaatagtgaggtgcaagaacaagtgcgattgcatcttgtattccgtcgttatgcatatctttcaccgcatcttcaataaacggttcaatatgttttaaaccaagatacatatggtactctacttcatcttgtacttcatttaaacgctgttctaacttcttagcttgctctaatgtaatagtagctaaaggagaaataccaccaattgcacggtaacgctctgttaaatcttccagcatttcaggacttggctttcttcctctacgaatatgtgtatagtaacgttcaatatcttcttctttatatggcgttccgtatgccattacaagcaaaccaattttctttttcatacagcaattctcctttacttcgctaactgccctttagagtattcatgaataaatgtagttaaacgttttaatgtatccggatttacttctgggaatacaccgtgacctaagttaaagatataacccggctgtttcatcccttgatctaaaataccttttacatgttcttcaataacagaccatggtgcaagtaagaatgaagggtccatattaccttgtaccgccttatgaacgccacgtgcacgtgcttcttcaatcggtaagcgccagtctaagccgactacatcaagcggtaagtcgtgccactcattcactaagtgtgcagctcctacgccgtgcataatcatcggtacacccatcttacgaacttctgcaaaaatacgctccattgctggtttaataaatacgcgataatctgctacatttactgttccaacccaagaatcgaaaatttgaactgcttttgctcctgcgtttatttgcgcttttaaatatgtaataaccatatctgctagtttatccattaaagcaaaccaagcttttggctctgcatacatgaacgctttcgtattatggtagttacgagatggaccgccttcaatcatatagctcgctaatgtaaatggagctcctgaaaaaccgattaacggtacgtctaacatttctgtcgttaataaacgaattgtatctagtatgtacggtacgtcatcttctggattgatttcccctagtttttctacgtcttgtaaagaacggattggattatcaataactgggccaatacctgatttaatttctacatccacaccaattgcaggtagtggtgacataatatctttataaagaattgctgcgtctacgttatattgatcaaccggcaattttgtaacgtaagcacataactctggattatgtgtaatttcaaataaagaatacttttctttaatctttctatattccggctgtgaacgacctgcttgacgcatataccatgctggtacataatcggtacgttcccccctacatgcttttaaaaatgtctcatttatagttcttaccaagacccttgctcccttccttaccaatgcttcgaatacgttcgatatttatctttttttactatacagcttgtaaaaacaaaatgcataatattatgtacgttgttcattaaattgacacaaacattcttaaaaacgcttactattttcacaacattcttattataacacagagaaaaactatggtttagctacttttgacttttctccttcacgattcgtttgtgtattatatggtacaacgtaaaagctcggttttgaaaatatgttaacgaacttttcctcatattccccagcaccatttacagtgctaacatgtgtatgaattccgttctccactctatagattcggtacataattctgttatctggaagtggtttccaacttaattttgctttaaataaaccgaaagggctaaatgatagtttcatttttacatcttcaattttgcgcagtcgaatcggagcgccgattgtttccacaccttcaggcttcataaacttctctttatgttctacattagccttcgttaaaattttcttaaacaattttgtcgcagatgcactttctccttgcaactgatgctccttatccgtacggtcataaccaatccaaacagcgcctactaagttaggtgtatagccgacgaaccacatatctcttgctcccttatcgtcatttggcaatgaagttgtacctgtttttccagctagcgcaccgttatatacaccaactctcgctgtcccttccttcacaactccttctagcattttcgtcatataccatgctgtctgcttcgagaagattttcgtctctacttttggagattccccaatgactgcaccgtgtctatttaatactttatcaataacgtgcggctcaattatatttccatttgctaaaaatgaacgatacatttttacaagatcaaatgttgaaacgccattttttagtcccccaagagctgtacttaaaccagcatctgcaatatggacatttcctttttctaaatattgctttccttcttctacccctaactcatttaatagagaaactgccggtacgtttgccgactctaaaatcgcatcatacatcgtcatttcttttgaatactcatgattataatttcgaggttcatacccttcaaaagaatttctttcatttgttaataaagaatacggattatactttttcgtttctagtgctggtgcataaacgataagtggttttaaaacagatccgggctgccttttggcaaaaacacgattaaatcctctcgggacgtactttcttcccccaatcgccgctttaatccctcccgtacgattatccattaataagaaagcaccttgcgccccttcttctttcccaggaaaattccttgcatcttgaaactggttatatgctaccttttgaatcttttcatccataggtacgacaaacgtatatcctccgcgaagtacttcttgatgagacaacccgtataaacgagcggcttcatctatgaccatatcaatatacggcatatatgcaagctcattctcatctaaatttttatatagagcaattgtcttcccttgataacgaacgctttcttctgcagtcaaatagccttgtttatgcataagtgacaatactagatcgcggcgttccttactcttctctgcagaatagtacggtgaatatccgtttggtgacttcggaaggcctgcaagcattgccccttcctctactgttaaatcctcaacatttttattaaaatacaactttgctgccgcttgaataccgtaagccccatgaccaaaataaatatgattcatatacatttcaagaatttgttgcttcgtatatttttgctctaattgaagagaaattgcgacttccttcaatttgcgcgtaaatgttttttcacgagttaaaaagacgtttttagcgagttgctgcgtaatggtactaccgccctctaccttctctctagctaacgtatctttataaagagcacggaatatcgacggataatcaatcccttgatgctcataaaaacgagaatcttccaccgcaacaaacgcctgctgcacatacttcggaatttgctcgatcggtacaaggtctctattttctacgtataatttcgtaatttctttccctttctggtcaacgatacgtgatgaagagtggaaaacgagctgcttttcatccatcatatagccaccagctaacacgataagtttatagagtacaatcgctactacgaacgttgcgacgccgcctaataaagtccactttactttcttcatacatcgtccttctttccaaatgatggtacatttattatttgaaaaagaagtatctttatgtatataatcttcgaagttttttaagagagttgatataatagaaacaaactagtaagggggcattaaaatgaaggctattatttcatacgaaacacctctagaacaagcacatttcactgcaaaaaatgatgaggaaaatatgttttataaagaaaatacagaagaatctgtagaaggttcacttcagtatgacgtactagatgctgtcggtgaattcaaaggacaacctggctatatcgtttgtaacaacatttctgtaacagacgaaggtcgccctgtatttgaaaaccgctttaaaaaccgcgcaggccttatcgaaaacgaaccaggattccaagcgatccgtgttctacgcccattaagtaacgatacatatgtcatcttaacgatgtgggaaacagagcaaaactttaaagactggacagaatcacgttcattcgaaaacgctcataaaaaacgtcccacgcaagtagaaggaaaacctcaggctcaagcgcatccacatgcagaacagcaaaagagtattttctctcgcccttcttttgtgactacttttgatgtgttagtttaatttttttgagtttggagttcggaaaccacggtatgtgaaattatatcggcgatttttcgaatatatcggcgcaactcgaattatatcagcgtttttctgaatatatcagcgcaactcgaattatatcagcgtttcttcgaatatatcgacttatcgacaaatcatgacacaaaaaggaaacaccattacacaccggtgtttcctttttctttgtaccaattatatatacgaagtgaatctttttttctcatatgctttacttcataaccccgcccagctaccgctacaagagttgtacataattcatcctttctttgaaaatacgattgattataacctactgcttgaacatgtcttcttcgcattattcctgtatatttcgaaaaattacgatatacaaccgttagttgattttctcttaattcataaccaccacttttatatctagcatacgcaagtaacgaaaacacgataaataacggtaaaataaaaaataaagcaatatattgtttcaaatatatactcacgctagcaattagaactgtgagtatgatacttattaaccagctcataatgaaataacgacgcaacgctgtttttggtaagtgagcgatctccgcctcaatttcataaggtaactctaaatatgtgagcaggtgctgtacatcttttttcttcataaaaggatgcaacatcacttcattacttgctgctccaatactgtgaattgcttccacttcaacagcgcaataaccaaatggctggcgaagcatacattcttttacagtaatcgcttgaattcggtgcaattttaagacaaattctttcttttcaaataacccttgaacgatacgaatttcttccccttttcgctcaattttaaagtttgcatatttcaacacatatccagccgtggaaataatccatgaaattgccattaaaattaatgctattacaattagtttataaacaccgtttcccatcacatacgcttctactttacttgtgaatccttcaggaagaacaaaatcaaactttgtgtaaagaagtaccagtccagaaaacactagtccgaaccgaccagatgtaatcgctgctgctaaaacctctttcgctgttaactgataaaccgtcttgctttcttcctcttctatttcttcttttacagtagtttctttcttatgtaataaagagattaaatgttttgcctcgtcttctttaataccagccaacatcacttctggttcactaccaccacccgctacttctatatttaacttcataagcccaagcatctgataaatgacgttagaagacgtactaacattttgcacacgttctttatttaaataactttccttctttacaaaaacaccgtgctttatatgtaaaatattattctcaatccagtacactttaaaataccatttaattgctgaaaaaatagccatgatgaataaaacaaccagaaggaaaagataaaataaataccaaggttccacttgttcatcaggtttaaataaaacaagaataataagtggcaacaaactcgcaactctaatacctaacaatatcgtaatcggatgttgcctcttatacatccttatcactcactttcgcaagttctccaatttgtctttttagctgttctgcttcttctttcgttaaacctggaatactatgagaagttgcggctgttgaaatgtgtaattctgctaaattatactttctcatgatcggcccttgctcaatcgttacgtgctgcacacggatcatcggaataagtacgcgttttacaacgaacattcccttttgaatctcaatctcttcttcatttaatctgtaactataatagcgctgacgtaaatttggaaacacaaaataatcaagtggaataaatgtaatagctcctgttactaatagtccaaacaaccagccccaccagttaaagttaatcataaaaaagaaatacgcaattacgactgttagtataactgccgtcccaattaaagcgtgaattcgccacactttcagcatattagaatgaatctccctttctaacggctgcatctcatcactccaattctatgaatttattacttatatattatcaaaaaataagatttcatatacatttttgtaaatttatagtcaaataaaaatatatgaatcaaaagcagattaaagaaaaacatacctcagttttgaaaattatatattataaatatgaattatattgaactaaaataaaccttacatgattcatgtaaggtttatcgttttatacacaatatatttcattattgttgagatatactagcatcgctttcaattcgcttttctttttggctcagttttttatctttagatttttttaatgttaaagtcataccaataaaaataaaaagaattcctgttatttgcattaaagttggacggaatccagtaagtacagtatctaataatattgccactgccggatccaaaaaaactaatattgagattgtttttgtagataaatagcgtaaactatcaaaaaacagataatatactatccctgtgtgaataaaaccagtagctataatatatgtccaattactttgagtgaggccactaaaagcatctaaatctataaatggtattaaaagaaatatccccaagaatgtttgtaaaaatgtcattgcatacgcactcattttgttaatccctttaccaaataaagttgtaaatgcataaaagagagctgcaagaaatccccatatcatacctgaagacattaatgaaccgacagagaaacttccatcgataccagcaattaataaagctcctgcaaaacacacaactattgaaatgatagatattaatgttaatttttctttaaagacgatacttccaattaacagtacaattactggtgcaagatgataaaccgagatagcaattgtaactgacatattttcaaaggctttaaataagaaaacccaattaaatactaagaaaaagccacatattaaaacttgaataacttcttttcgttcccatttatcttgtttatattgccctgtaagcaaccagcatacacttaaaaatattgtcgcaaaaatacaccttacaaacactaattcaaacgaaggtaagtttgtttgaactgaaaaaaatccaactgatccaaagataaccattgatgctatcatctttaaagccggtaccgttttctcttgcttaaaacttttttgaagcaaattaatccccctccaataaaaactcggtttatagtgagaaaaacaccagcctaaaaaaggacaggtgcttttcctcaaaaacactcaattataaatttttcccagcagtccaaccaccatcaattacaaaattagaaccagtaataaagcgggcctgatcagaaatcaagtactcaatacatgaaacaatatcctgcggcaacccccaagtatctaaagattgattactttttatcatagacatcaaggctgtattactaaagtattcttctgtaagttcagttctaataacaccgggagaaatgctattcacccttatattttgctttccaaattccatagccatctgtttagtcaatccgattaaagcatgctttgatgcaacataagcagctcgctctggttcagccattaatccagaaaccgatgctatattcacaatacaaccttttattttcgattcacaccatcgcttagctacttccctagaaaggataaatggggctactaaatttacatcaattacttttttaaacatatcatcggataaatgtaaaacaggtgttatctctcgaataccagctgcatttattaatatatcaggagaaagcttttctaaatctaattgagtaaacagattatgaatcgcttcgctattacttaaatcaatttgcactactttcaaaggcatatctgttttcatataatctattaagttattattattaatatcaagcgctattacatgaaatgatttttctaaaaagtattttatacaagcatgacctataccgctattggctccagaaatcataattattttattctctctcattttgtctccttataagaaaatgttactaataaaatatcacgaaaagcctccgtactacattctgttccaagtggcgttacggcatggaagaccttttgtccaaatactaaagtttctaaaggctccttcaaacttataaactgattaatttcccgaggagaattagctattaaattatctccaccaatagctgtattacttaaattcataaggtgtaaaaacactactggttcatcatctttatgtaaccaaataggtgaactaaaagatggtctttctttagtagctttatatcttacttgatgtaaacctataattaagtctttacttgtatctattatatttgttttaaatgcaaattcagtatcgaagcgcacgatattttgaattaaaggattacataaaaagctatcatttatgctattgaactgtctaactttcccgccatcgtcatagttatattctttagattggaagtaatcattactattatctaaaatataatctggtgaatcaacatactttatataccttgaataagatctagcacgacattcaccgtatgcatcatcttccaaattataataatctaactgtgcttgtgttaatagacgatgattctcttcctcttgtaaaaagatttcatttgaaatttcaaggaatcctttagattcaaattcatgtaccttttcttctatgctaaagccactcattttactaagaacaaacgtcattataaaaacctccacactattgtatttttctatctcaccctatgttagaaatgcaataagtaaccgagattcttgcttaataaaattaaaaattatgatattcaattaatacaccaaatgaaatatacgtaattcattaaaattatttattaagcaatattatatatcctttcgggtattttttctaattatctgaagatttatcaacattagtcttaatattcaaaaataaagaaatagatttttcagaaagataaaactgcgcgtattgcaattatttatgtatataactttttttaaaattatattttaaatatagctagttttttataaattttttgatataattacatacgggaaaagggaagaactttgtcttcccttgtgtttttatttgcatctagtacttttgctagatgctttttttatgctaaaaaaggtatcctcaaatactttgaggataccttttcacctttattatctctgctgttttctacctaatatgagtaatccaaaactcatcattacaagaagtgctcccatatatggttccacaggcattttctgccctgtcttcggtaattctttttcaggtttctctggattcggtgtcccaggcttttctggatctggtgtcccaggtttttctggattcggtgttccaggcttttctggattcggtgttccaggtttctccggattcggtgttccaggtttctccggattcggtgttccaggtttctccggattcggtgttccaggtttctccggattcggtgttccaggtttctccggattcggtgttccaggtttctccggattcggtgttccaggtttttctggatctggtgttccaggtttttctggatctggtgttccaggtttttctggatctggtgtttctgggcctggtggcgctaaatgattcaatttgtttaatacttctaattgaactgcatttatcattccatttgtaatttcaaatggaattggattagttaatttttcatatccttttggtgcttctacttctactagtgtgtagttacctacagatagatctgtgatttttgcctttccatctttatctgttgttactttcactactacttttcccttttcatcatgaacctcaaacacagctcctgataagacttccttgctttcagcggccatttttataatctccactgaacctttgtctaactgttcattctctactttcaatgataagacttttgtcataccttttgtaatttcgaatgatactggttccgttaactttttgtaacctggtaagctcttcgtctctactaatttgtattttcctactgatagatctgaaacgtttgcttttccttctttatccgtcgttactttcgcaactacttttccttttgagtcacgtacttcaaatacaacattttctaatggtgctttactgtctttatctatttttgtgatttctacattccccgtatctaccatttcattttctacagtgaacgctaaagattttgtcataccttttgtaatttcaaatggtacaggcttttctaattttttgtagcctggtaaactctctacttctactagcttgtactttcctactgataaatctgaaactgttgcttttccagctttatctgtcgttactttcgttactaccttgcctttgtcgtcttgtacttcaaagactacacctgctaacggtgccttattatctttatctatttttgtaatttctacatttcccgtatctaccatttcattttctatgtttaatgatagaacttctgtcataccttttgtaatttcaaacgatactggttctgttaattgtttgtaacctggtaaactttctttctctactaatttgtactttcctacagataagtctgagatttttactttaccatttttatctgtttttacttctgttactactttgcctttgtcgtcttgtacttcgaagactacgccttctaatactttttgactatctttatctacttttgtgatttctactaaacctttgtctaactgttcattctctacttttaatgataagacttctgtcataccctttttaatttcgaatgatactggctctgttagttttttgtagcctggtaagctctctttctctactaatttgtactttcctacagataagtctgagatttttgctttaccatttttatctgtttttacttccgttactacttttccttgttcgtcttgcacttcgaagactacgtcttctaatactttttgactatctttatccacttttgtgatttctactgagcctttgtctactagttcattctctacttttagtgataagacttctgtcataccttttttgatttcaaatgatactggtttcgctagttttttatatcctggtaagctctctacctctactagcttatattttcctactgataaatcagcaatctttgcttttccttctttatctgtcgttacttttgttactactttgcctttttcatcttgtacttcgaagactacgccttctaatactttttgactatctttatctacttttgtgatttctactaaacctttgtctaactgttcattctctacttttaatgataagacttctgtcataccctttttaatttcgaatgatactggctctgttagttttttgtaacctggtaagctttttttctctactaatttgtactttcctacagataagtctgagatttttgctttcccttctttatctgtcgttacttctgttactactttgccttgttcgtcttgtacttcgaagactacacttgctaatgctttttgactatctttatctacttttgttacttccacatttcccttgtctaacatttcgttttctactgttaaagcaagagattttgtcatgcctttttcaatttggaaagtaatcggatctactaattgtttatatccttttggtgcttttacttctactaacttgtatgtgccgactgataaattagtaacttgtgcttgtccttttttatctgtcgttattttagcgactacttgtcctgcttcatcttgaatttcaaagactgcatcagctaaagcatctttattttctttatctacttttgtaatttctacatttcctgtatccactaattcattttctacagtcaattgtaatgctgttactctacccttttcaatttcgaatgaaattggcttttctagtggtttgtatcctgccggtgtttctacttctactaactcatactttccaatagataaatctgaaacgtttgcttttccttctttatccgtcgttacttttgcaactacttttccttttaaatcacgtacttcaaatacaacattttctaatggagctttactatctttatctatttttgttatctctacattccctgtatccaccatttcattttctactttcaatgatagaacctcggtcatgccttttttgatttcaaatgatattggtttttctaattttttataaccaggtaaactttctacctctactaattcatactttcctacaagtaaatctgaaacatttgcttttccatctttatctgtcgttacttttgtaacttcattacccttttcatcttggacgatgaatgttactcccgctaacggtgctttattatctttatctatctttgttatctctatatttcccgtatctaccatttcattttctatttttaatgatagaacttcggtcatgccttttttgatttcaaatgatactggatctgttagtttcttatagcctggtaaactttctttctctactaatttgtactttcctactaatagatctgagatttttgctttaccatctttatctgtttttacttcctttactactgttccagcttcatcttgcacttcaaaaactacgccttttaatgcttttttgctgtctttatctatttttgtaatttctactgaacctttatctaactgttcattttctactttcaacgataggactgttgtcataccttttttaatttcgaatgatactgaatctgttagctttttgtagcctggtaaacttttcgtctctactaatttgtacttccctactgataaatcagagatttttgctttaccatctttatctgtttttacttctgttactactttttcttgctcatcttgcacttcgaagactacgccttctaatactttttgactatctttatctatttttgtaatttctactgagcctttgtctaactgctcgttttctacttttattgctaaagcttttgtcatacctttttttatttcaaatggtactggttctgttagctttttataacctggtaagcttttcgtctctactaatttgtactttcctactgatagatctgaaacatttgcttttccatctttatctgttactacttttcttactacttcatctttctcatcttggacttcaaattcgacacccgctaatactgctccgttttctttgtccacttttgtaatttctatattacctttgtctaccattgcattttccacttgtattgggaatatgccgtcccctgttacacttacttcgaactctgtttcttttaattggtagccttcaggcgctttcgtttcttttaaaatatattttcctagtgctaacggtttagagattgccttaccatctttatctgtaacaatatgttcgactactacaccgtcttttactatatcaaactctgcatttgctaatggtttttcaccattttccgaatcaattttctttatttcaatttgacccttttgcacagtatttttaatttcaattgtttttgtttctccagcttgaagtgtaacctctactgggcttgttaatttttgatatccttctggtgctactgtttcataaactttatacgtcccaggagctaaagtttgaggtactgaaaaacctttttcgtccgttgtcagttttgcaacaacttcatttgcactatttcgaacttcaaattcggcacctttcaaccctttgttcggattctcagaatctattttatgaagcgatactgtaccatcttttggagcttcaggcggtgtaatagttacttcttttgatgttaatgttttatcatcaaaatgtaattccgctttattaggaatcttcttatctacgtaagaagataagtctgcattatttttaattttcgccttgatactaagattaattatctggtcttcatatgacttataatcaaaattctcaccaaacgtaaatgttacttcacttctttgtttatctatatttaacgtccctttagaagtaatatcttggccatttttatcatacacttttgcctctaatacttctaaaacatcttctaaatcatcactaattaccatagatgtgtatttaggaggatcgttcggtatatgtgtaccaacttggtattgaataacttgatccatttgtgttagctgctcattctctacaagcttgtcattctcatcaactatatttttttcaatgctaggtggattattgtcacctgaaccggatcctcccccaccactcacaaatacttgtcctactttttcttcagttttaatatttttaccttctaatttcacagtatttttatgaggttttgcagcaggatttgtaacctttgttttatatcttaaaatatagccttttgaactgtctggaaattcaattgtaaatccagtctttgttgcatttattttaatgttagataaatttgctggcttaatatttgttggtgcataaccatcttcaaatacagcctcttctaatactacgctgtctgtaattaactcatgcccaggtcctaatgtatctgttaatttaagatcttgcatttctgttccagttgcatttacatatacaagccaatcagcaatagacggatcttcttgattataagaaccccatttcaatagattttccgtattgggttgtggcttcggtctctctgtcgtattacttacatttacttctttatttacgatttgaccatcaacgttaaattctaatggaatttctttaacaccatcatatgcttctagaccaaagtagaattctacgaataaagaacctttaatgttgttctttccttctacgtaatcacccatagtacacgttaatagaccctttttcatctcacatgtaccaactgtttttccttcagcatcttttaaaggaaaactcatattcataaggtcttttcgaaactcttttggcatatcaattgtgaattgatctccactttttattttttctttagctgaccacttcacttctactttcataccatctgaggcttgatatggttcagatgtcgtgccatcagtacgggaaatattaatttcgtccactggacttttcatcacagcagcttgaataactggagcccacacattcagcactgaaaataatactagaaaaactaatgaaaccattgaaatatgtcttttagtacttttcatttgcatagttccctcctaaatttttatatttatataacaaaaaaagatcgtccggttgcatcaaaaatgtgcaaccagacgatcttagtaaccaatatgtattaccgtagactctaagctttgcggcctatcctttcgaatagtgtgctaaaaatatcttttattctttttttgtttcattttcctcttaaaccaaatattactataccgtctggacggttataattcaatactctataaaattgttctatttttctaataaaaaaaataattcaccactacattaaagaagcaatggtgaattattttctcattatatagttcgcatattctatttatatgaattactaataagagcttgaatcactttttctcttaactcggggcttagccttccaacccctaaatattccgaataccataatccatctgctgctaatctaataattgttgcacaaactgaatctatctcatcattttctatatttttttgcagttgctgaaatgattgttgtaatggctcaagtaattcaggttttaacatgagtgctgccatcatactgctagacaactcttctgttcttctctcattacttaatctttcctctacaaaagagcgaacccatctccctttcctctctgagtcttccgctactttattgtaaatggccccttcataatcctctacccctcggactatcataccttctattaaagcttctttatttgaaaagtgatacaataatccacctttgcttaaacccgcctcttttgccactgcttctaaagttaatttagcaacccctttacattgtacaatttgagaagcggccgccaaaatcttttgccgcgttatgcttatactcattcctttttaaaaccccatttctactaaatttatataaatacgaatcttatttttaatattgttgattactactaagtattttctttatacaacaaaagcttcattacctttgaatttttagttacttattctattaaaaatttccatatcattcaatatgataacattaaatacacaaagctgactatacatctatacttttgtatttattgaaaatatatccattaataaaatttaccgatttagtccttcttattactttaagacagcagtaattctttcagtactaaataaaaaatgttattactcccattaaattgagtaataacattctacttaacaaattcgctgccaactagcatccttcacatcttcactagtcggttttctaactgatccaataaagtgaaactttatatccgcaacatggacaggtgtatttcattttgtcactccattattaacttgttttcccatatattccgactcacaaagaatgtaacagcacaaatcatagttatccccatgaaaaatgtattagaatcttcatatgtagttggaatgcctaccgttacgaaaacaatactaaaagctaaaaatagatataataataaagatataatatagcttagtttaaatcgtaaaatgatacctctaaacaatagctcaccaagtagacagccacctaaaataataggtactccgaaatacaatgtaaggactcccatttgcgcagtagattgaattatctttccaattatgttcggcgaaaccagctcactatcgtttcccatcctatcatataaatcaagtgctgttgctgaaataaagaaacttaatatagaaaatgaatacggtattaaaaatttgctcactctcattcacctcgcttttttctttacatatattattcattatttcctatcatttttacataaaaaaataaccctctatgataaaacatagagggtagcatttctatataaaaatctataccttatcctgaagtgaatcccgaaaataggacaaatatcaaaacacctaaaccatctgctatctgctccctacattctttagggtagatagtttatatgttttattagaaagtagtgccttcttttttataatattcttttgaaatctcttcataaaatgcggctgatgtcgcgtagaaataaggtgctaaccataagaaaccgattcctacagtaagaatacttaaaatgaaccaacctaagaaacttaagcatagtaaaaagtaatccattttatgtccattcatcatatgacgactctcagtaatcgcttgattcgctgtatattctggatgatcattcaaaataaaatatgtcatagaataagaaaatgatttaataatacctggaataataagaagtaatgtccatagagtcaagtatacatacattagtaaatatgttaaaaacgacttcatcaacttacttccatcgctaaaccatctaaatatatgaccaatgcgagcatcagtcccacgaattgcatttaaaacaagataataggcacctattgttaatggaccaataacaagcattactataatacttactgtaagtgaatcacttgcttcttcccaaccccaaaatatcgagaaaatacctgttgttagcatttcaacagctccaataaggattccaattaataaggttgcccctaccgctagtccccatcttccttttaatgcatcaagtgcttctcttttcaactgacttatcatatataacctcctaatactatttccattttattataccatttatatcaaaaatcccacatattttcctaaaacagaagcatattaccttttttcatacgtattgatacatgtgtgctgtagttgtactaatatatggattaaacgactcttttccctataacaaaaaagcctgcctttcataataggcaagctttctcaagttacatctcatttattttcttcttataccaatcctgcattctctccgcatcttctactctcgtatgctctattttataactagatgatgcactcgaaaacttatacgtacataaatccgcacggcgctggaaatatgattgtgtcttctccattgattggacgtgtcttcttctaataagtcctgtatattttccgacgctacgatagacaagtgtaatttgttctccgttaacactgtagccatttgttttaaatgttgcgtatccaagtgtaaagataaggattgcgagcggtagtaatgcccacatgatgtaatacttttcaaagtatatgcttattccagtaagcgggattgcgagcatagcgaaaaagataaaactatcaatgagatagcggcgcaatgctgcttttggtaacgaagtaatacttgcattcagttcgtatggtaattgtaaatgcgcgagtaattgttgcactcgatcttttcgaatgataggatgcagtgtaactttttcttctttcccttcactttgaatgacttctacttgcacagcacaataaccgaacggttggcgtaaaatgccttcttttatcgtaatcccttgaatgcggtgcaattttagtacgagttcttttctctccagtaacccttgcgaaatacggacttcatcattttttcgattcactgtgaagttaccgtgttttaacgcgtagccaattgtagatatcatccaagaaacgacaagtaaaatagctaccatgtaaatccagccatatatatcgtggtccattacatatgacgtcacactattttttatccatttcggaatatactcatctacttggtgataaacgaaaaagattaaagagaacaatactccaaattgaccagatgtaacagacgctattaaaatctctttccacgttaacttgtactctgtcgtttgtttttcctctgtaacaattgctttttctactgtattttctgctgcttcgtctaacgttttttctgctttcacttctggagttggctcatttagcaaagtaataagctccgtcgcctcttctaccgtaattccagctaagctaacttctgcttcatcgcccccgccagctgtttcaatctgaatttttttcaaaccgagcatttggtatagtacgttagaacttgtattaattgtttgaacacgttctttatttaagtagctctcctttttcacaaagagaccttgtttcacatgtaatacgttattttcgacccagtatactttgtaataccagcctacgatagctgaaataattgtgatcaacgcaaaaccaataggaactaaataccaaaatggaaactttccccttaagctaaaaagaaaaataatgagtggtataaaatctgttatttttaattctaataacatcgtgattggatgctgcctcttatacatcctcatcactcactttcgctaattctgcgattttcgttttcaacatttcagcttcatacatcgttaaacctgggatgctatgagaagttgctgctgttgaaatgtgtaattctgctaatccgtattttctcataattggcccttgttcaatcgtaacgtgctgcacacgaatcatcggtactaatacgcgctttacgacgaaaagaccatgctgaatttcaagttcttcttcatttagttggtagctgtaataacgttgacgtagtttcggaaacgtaaagtaatcaaacggtgtatatacaattgttaatccgatgagcacatagaaaatccaagcccaccaattaaacttaatcataaagaaaagatatgccaaaatgactataatactgattcctagctcaattaaagaacgcgctttccacaccttgaccatgtcagggtgaatttcatttttcaatggatccatgtaaccactccaaatctagtaatctaatatatgaatactctcaatctatattttacgtaactttacagaaaattgaaattcaatcttctttcttctcaggaataaaatatccgaaccaaagtagccaaatgaaaccgattaacttcatccaatttccatccgcttgaaaagcttcaatcatacctggtattttataaaccccaataaatccaagaaaaccgagccaccagtttttttgcattttcatctttactcctccttcattacgtttttcacatttcgaatccaaatttctttatactttaactggaatcccatgagcatatagttgctcatattatcaatcacgagtgctagcgtatgagcattttcttccgtttcatgttgtgacactacgtcaagttctacgcctttcttcaataaatcgtggaaaccatttaagaaatcttcttgtatttcaaataagcgtttctgatacttttcatttcgcgatgcagttacgagaaattcattgataacgcgtaatatcccttcttgcccttcatattcagagagcatatgtaaaccatcagcaattaacttttctgcaaagttttctttcgtatattgctctttatcgaaataactcacgaaatgatatccagagaaaatttcttcaaataaaaaatcgattaacgcttctttagaagaaaaatgataataaatagccggttttgaaatacctacctctttcgcaatcatggaaagactcatcttctcaatgccgtgttctgccataagtttaaatgaagcctctacaatgttttgcgatgtttgtaaattcttcgtcatactgtacctcacttatttttacttaccggtcggtaagtaaattataaaacaaaacgaaatgattttcaatttagttagcactacagaaggtgtttatcagaaaatacagaaagttataaagtaaaagcaacatataacaataaggaggatatcatatggggcttggtggtaatggcggtagtggtggtaatggcggcggtgaagcaggacaaactggtaagagcggattttcattaatcattgtactttttatcgtattgattatagttggagttagctatatcggacttggcttctaagaaaaggcgtcctacgttacacatgtaggacgccttctttttaatccctattcagcaatcgcatacgataacaattcatcgtcacttctccgagtctttgcagtagttgatagttcgcatatgcgcctaccggggcaccgattattggtacgagctgcagcattttggctaaatcgatatagtctcggtactctgtttggaacttttcccagtccatatgattttcttcttctgtatcccacgtttcgattgctttccatatttcttttcggtgatcgtcacttgaaaaggcaagctgaaaaacatgaaggataaaaaggcgctcttctttgttgctcgtatcaaatccgtacaatgtcgctgcatcgaataaaaatttaattttaatgccgagtaaaagcggaaagtcagcaagaccgaggagaataccgccagcccccgtccctgccccttctgccgctgctatttttttatactcatccatttttttacgaacttcatcgtcacgtctttgcagtgaccatgtcgtctcttttagcttcggctttataaagtttgacccggcgctgattgtttgcaccatcatacgaatcgtctctgttaataccttttgtactttcgccggaatgagctgttgcaccttcgtctgcactttctttgagaaccgtgtcatcatagaagaatctttcataaatgtagctttccactgctccagttcttttataaccttttcttcatatgtaatcataggttcattcccttcaatttaaacgctcaatgcgcttcgccccgtattggtaaacgaaaccgatactaaataatatgcttacgataagtaaaattcctgtcatcatgaaatctttcgttgctagtgcaaatataactgtaaagattacgctcccgatgattagaatcgcgtttaataaagtaagaaaatctttcttcttctcttctccccctaccggatacaaatcaagccaaatcttcatgcggtgatgtttccataaagttaagagctgataaccgattaagtataggaaaataaggcttacgataaatcgtccatataaaaacggaatgaagtacaaaataactcctccaagagcgagcaaacgcacatataatccaaaatagttacctgatcttaaaaacgttctcgtatataagtataaatatgtacgcttttcaccaatcatcgaaagaatgaaatcgagccattttctgcgtgctactctttcttttaatgctggtacatcaacgaacatgttcgcgatgcggtacagcagcatcatcttcttaccttcttcagaaattaaatactcccagtttagcggctttcccttcaccatttgatgcagtactacgaggtataacaccatgagaaggacgattccaccaataaacataacggaagtacgctctaaaaggaaataaacaaataagccgtttaaaataaaacgaatgaaccaatcagctctttgtatattttgatctgttaaaaatgacttttcccatgctacgaataagttccacgcttttacgatgacaaacgcgagtacaatccatatgtaagccgctcctgtttgtttcatttgctggaagtataacggagcaagcgctgccgctacaattgcgattatgtacaactgaatcataaacgtaaaaagaaacgcctttgtaaagtatggttttaatttttgttcaactggcagcaagtaaacgagatccgcttcttttaataacgtttgaatggatccagccgttaacacgagtccaattaatactgccattacgagcgccgccggaaacgaaggtgttaacgtttgtaaccattgctggtaataatacgctcccgcaccaatgatgaacacgaaaataaatttcaaatgatcattaaatacgtatttactatatgtacgaacttcttttagaaagtgacgaaatcgttctttccataacgctgtgctattcataatcttcttcctttgttagcgcgatgtaaatatcatctaacgttgcacctggcatattaaactgtgattgcagttcagatagcgttcccttcgctcttacttcaccttgatgcaaaataatgaacgaatcacaataacgctctgccgtcgctaaaatatgtgtgctcattaaaataccggcaccactctttttcatttggtccatcatttgaagaagggattgaatcgctaacggatctaatccaacgaaaggttcatctactatgtaaagagatggctccactaaaaatgcgctcataatcattactttttgtttcattccttttgagaaatgagatggaaaccattttaaacgatttttcatacgaaactcttgtagtagttgtcctacacgttcttcatattgtttttcatcaatgccatacgccatagctgttaatttcaaatgctcttctaacgttaattcatcatataatactggcgtttccggaatgaatgaaaagctagaacggtacgctgtcatatcatcacgaattgttttcccattaattgtgacagttccttttttcggttccattaaaccgataatatgtttaatcgtcgtacttttaccagctccatttaaaccgattaagccgacaagttcgcctttattaacagagaacgaaacgtcttttaatacaggtcgtttcgtatatcctcctgtaacattttctacacgcaataactcgctcatacgacaccactttcttcattagtattcattctatattcatcttaccaaaaattatgctgtactacatagtatccatgtactcaaaaaaattttttaaatttattagcatatatttttccgaaagcggacatcataattattgaagaaggaacacattgaaaaagcaaccaccaattgatgagtacaacaacatagtgaagtcatcatgaaatggggtgtccaagttggacaatgaaatttacacataaccagatcatttgtttcattttcgaaacggggtgtctctgaaagagcatatactgttttaaaaaataaacaatttcattttaaaaaagattgcaattcatttcacttgaaaatggggtgtctacggcagaaactttagccgatttaccgtgcatttcttaaataaatgaggtgtctgcgaaacgtaaattacgataatgctttttcaatccctcttcagaaaacaggaagctgagtcagcttcctgtttttcgtgtttgttctcttatataattatggtaaaatacggctaaggatatttgaaaggatgagatcaatgaatcatacagcagacaattgtattttttgtaaaatcattgacgggcaaatcccttgctcaaaagtatacgaagatgaacatgtgcttgcatttttagatattagtcaagtaacaaaaggacatactcttgttattccaaaagttcacaaacaagacatttttgcgttaacgccagaaatcgcatcacacattttttctgtcgttccaaaaatcgcaaatgcgattaaagcagagtttaatccaattggctttaacctacttaacaataacggtgaaaaagctggacaaactgtgttccacttccaccttcatttaattccacgctacggtgaaaaagatggtttcggtgctgtttggaaatcacaccaaaatgaatacactatggaaaatttacaaaacatcgcaagtacaattgcaaatagtgtgaaataatgacactataagaaggcgtaatacataacaagccagttccctgaagtcatcaaattccgcatggcttgtttctttacttaaaatgctcagggatgattgtttgtgcatagcacatataagaaagatatgcatatttttcccatcatgaatacgaacaaaaaataaggaggtctccttttatgtcaaaagctaaatcctttattacaggtgttatttgcggcggagcagttgctggactagctgttcttttctcaactccttcttctggtaaagacatgcgcggcaagttaaaagaaaaaggaaatgatattaaaaagactttagctgatattacagctgatacgaaattattaaagcgtcaaattattgaaactgcttcagaaggtaaagaagtgtttcaagaattaaaagatgacatgcaagacacgctttctaactggaagcaagatatttctcaaaacaagcgccatattgagaaagaaattttggacatccaaaagtcaattgagaaactacaagaagctgttccagaaaaagcgtaaacaaattcctgcttagttttttgcatataacaaatattttttatataaattgaccttgacacggcatatcatatagatatgccgtgtttttatgcatttacaatatatgttatcacttaacatgtaaggacaacgtatgtattcacgactcataaaacgcttccatagttatgcatgatttgtatagaatgtcatttttccgaaaaattttcacaattctcacaaaaagactttattaatttttattttactggcataatagatagtaatgaaaaaagaatgttaaagtgggtgagtaaatgaaaagtggagaaaaagattactcggtaaaagaagcgatgattttcagccaacgcattgctcaattatcgaaagcgttatggaaatgtgtagagaaagattggcagcagtggattaaaccttacgatttaaatattaatgaacatcatattttaacaatcgcttatcatttaaaaggggcttctatttctgagattgctaagtttggagttatgcacgtatcaacagcgtttaacttctcgaaaaagctggaagaacgcggctatcttgtattctcgaaaaaggaagatgataaacgaaatacgtacattgaaattacagacaaaggggaagaattactacttcgcttaatggaagagtatgatcctgaaaataattcagtgtttaatggggctcttgcacttcgtaatttttatgggaagttcccagaaaatatcgaactgattgcaatcctgcgtaacatttacggacaagactttatcgatatttttgagaaatcattagaagatattgaagagaactttacagaatccgatcaaaagttagttaagaaataatctatttattttttcgcaatcatgcttaagaattcattcataagcggcttaaataaaccttgttttgctagcgcttccgcagtttcgtgtacttcgagctgatgtggaagcgctttttcaaattgatctaacagcgcatcgaacaaaagaagcccttctgctttctccactacatattgatcgttcagtttttcacaaagatttagtatacgttcaatatcttttttacgagcttttttctttatgatcaaagaataaaatggacacttctcttcatcaatcattttaaataataagtctacatagtattcagcttgttctaatcttctaacaacgtccattttctccctcactttctaacacaaagtcttctatttctgaattttgtaacacgaacaaaatatcgtgtgatacaatatatgtatatgtattttagccaaaaggaggtctcgcctcatgacacttataacagttgtttttgtcgcattcgcacttcttgttatattttacacgaatttcatgacacatacactgtgtgaacgaaaacaaatagctgcgagccgccagcccggtgtctttcgggttattaatgtatgtataacaattttattaatttctagttatatagaaattatatttcatggaaagtgaggaaggaaagccccttcctcacttttttcctctataagcaaattatacctacaataaccaataaaataaacagtacaagtaataaaataagttgagaattcatccccatcccctcctctattctgtatatgcggcatacgcccaatatggcacactttcaaaatctgacacgtactggttaatttttctttatcaatatgaaaatgcgtcgaaatatgatatattaaattttgtacatattgcttatactatagaacaaaacattcatcaaaactttatcctcagccacggtaagccctgttaagcgcgctttaccaatataaaaaagcaaaagtatcagtgagacttaatcgggctcttatgaatgaaaattcatcggtgtaggataaattaaaaatacataatagtaggagtgtttatcgaatgaagaaagctatgcttgccttagccgcaacaagtgtaatcgcattatcagcatgtggaacatcatcatcagacaaaattgttacatctaaagctggtgacattacaaaagaagaattctacgaacaaatgaaaaattcacaaactggtaaacaaacactaaataacatggttatggaaaaagtacttattaaaaactacaaagttgaagacaaagatgtagacaaaaagttcgatgaaatgaaaaaacaatacggtgatcaattcgatacactaatgaaacaacaaggtattaaagaagaaactattaaaaatagtgtgcgcgctcaattagctcaagaaaaagcggttgaacaatcgattactgataaagatttaaaagcaaaattcgaggattataaaaaagaaattaaagcaagtcatatccttgtaaaagatgaagaaactgctaaaaaggtgaaagatgaacttgctcaaggtaaatctttcgaagaattagcaaaacaatactctgaagatacaggctcaaaagaaaaaggtggcgacttaggattcttcggaccaggaaaaatggtaaaagaatttgaagaagcagctcaaaagttgaaaaaaggtgaagtaagcgaacctgtaaaaacacaatttggttaccatattattaaagtaactgataatcacgcagatgcaactttcgataaagcaaaagctgatattaaaaaagcactagttcaagaaaaaacacaagatgctcaatttatgaacgatcttatgatgaaagaaatcaaaaaagctgacgtaaaagttgacgataaagatttaaaagatcttttcaaagagcaaaaagctgacgataaaaaagacgaaaagaaataatgaagtaaaaagcttgggcttaggcccgagctttttttatctcctcttctctcagtagttaatctagattcggtaaatgaaattatatcggcgatttttcaaatatatcgaccgcaactccaattatatcggcgattttcaaaatatatcagcgcaactccaattatatcagcgattttcgaaatatatcgacttaccgacaaaaaacgacaacaagcgtgactccctcttcaaacacaaaaaaaccttgatccacgccacgtagaaccaaggtttatcttattatcattgattaaatgaaaaaactatgttaaattagaacagaaacacgttttacaaaacaaaaggaacgtatttatccgtatcttaattgtacaccaaaacacatcttcagtcaacctctatttttcacttttaaaggagtgcttaccgtatgaacaaaaaacttgatctagagcaaaaaagattggataccgtaattgaaacaattacggagcaaattgataaactggaaaacgaaactggcagacgccgagcagaagtaatcaatattcgtaaacacttttgggatgatgtgaaagtgaatactgatactttcgatgattatcttgaaacagttatcaacttaagacaacaagctcagtcactagctgtcacacaaattacccataagcacacctttaatcgacttgccgcattaagacgcatgcataaagcaccttatttcggacgaattgatttcaaagaagaaggagaatctgccgcggatcaaatttatatcggcgtcgctacacttactgatgcaagcggagaaaacttccttatatatgactggcgcgcacctatttcgagtgtgtactacgattatccaccaggaccggctgaatacagtacaccaggcggcgtaatccacggtaatgtggagaaaaaattacaatacattattcaaaatggcgagattgattctatgttcgatacgagccttacaattggtgatgaaatcttgcagcaagcgctcggaaaagggacgaataaacatatgcagagcatcgttgctacaattcagcgcgagcaaaatgaaattattcgtcacgatgaaggccgactccttatcgtgcaaggagctgctggtagtggtaaaacgtcagctgccctgcaacgaatcgcctacttactatataaatatcgcgaatggttaaaagcagatcaaattattctcttctcccctaactctatgttcaacagctatgtttctaacgtactacctgaactcggcgaagaaaatatgcagcaagtgactttccaagaatatttaaaccatagactaagtaagtcatttgacgttgaagatccttatgaacaattagaatatatgttaactgaaacgaataatcctacctataaaacgagaaatgcgagcattcgatttaaggcatctactcaatttttcgagatgattagagcgtacagacaatctcttgaatcttcaggcatgctatttagaggaatgaaatttagagggaaactgattgtttctgcgaaagaaattacagaacaattttacaataccgactcctccctccgcttccatagtcgaattgagaagttaacggattggctaaacaagcaaatagatgcacttgaaaaagcagaactgaaaaagccttgggtagaagaagaaattgaattacttagtaaagatgaataccaaaaagcttataaatatttacagaaaaaaggcgagtttgacgacaactcctttaatgattttgaaaaagaaacgagagtacttggacgtatgattgtccgtaaaaaattgaagccactgcgtaaaggcgttcaaacattacgctttatcaatttcacaggcatatataaacaacttttcacagatgcatcatgggttactgagaaaaaaccgaaagagtgggatgacatttgctccttaacagtaaacatgcttgatgaaggaaaactatattacgaggatgcgactccattcttacttttaaaagaattaattgaaggcttccaaacgaacagatcgattaaacacgtactcgtagacgaagcgcaagattattcgccgtttcagttcgagtttttaaaacgtctcttccctgctgcaagaatgactgtactcggagactttaaccaagcgatatttgctcatgcgagtgaaacggttaatttcgatacacttacaaatttatacggtccagacgaaacaaacggcattaacttaactcgtagctaccgctcaacaaaaccgattattgaatttacacgtgctctcgtaccggaaggcaagaacattcacgcctttgaacgtgacggcgagaaacctacagtgacgaaagtatcgaatgtcaacgaactgcacgaacgtattactgccaaagttgctgaactacaaaaagagcagcacaatacgatcgcaattatatgtaaatctgcagctgaaagcgcagctgcatacgaagcacttaatcatatcgataatattaaactcgtgaagagtaactcagccgagtatgagcaagggattgtcgtaatccctgcttacttagcgaaaggtattgaatttgatgctgttattatttacaatgcttctaaagatgtgtacagcgatgagagcgttcgtagattgttctacactgcttgcacacgcgcaatgcatgaattgcaactttatagcgttggcgaggttagtccttttatacttggagctgattcggagagttttgagcttataatgaaaacaccttgataatcatcaaggtgtttttctcattctaaaaggaatatctttacgtcgatatacactcagcacaatccccattataaatgcatgaaacagagttggtatcaagccgtaactaataaagggtaatgatatagaaacacgtggtaatatcccaagaatcatgccaacgttataaacgaaatggaatacaaaaagagttactccaccaacgaggagtaatttaccataaccatcatttattttataagctatattcattattcttactgcaaaaagagacaaaatcaagacaagaactagcgcaagcacatatccataatagtaagtcaaacttgcaaatacaaaatcagtatgagtagcagggatagactttatatttccatatgtaccaaaccaacctgccgatgccattgcctcttttaaacgtaaataccattgatcatgctctgggtttaaaaaccctaaaattctagctatccggtattcttttacagcagaccaggaaaatagatctctaataataagaagaaaaattggtaacattgtaatgagccatgctgttttctttcctatcttactccaccaaagcataacgaataccatcgtcatatagatgaaaattggcaccataatcgatgtcgttaaaaatagatataaagaaaataaatacaacatgaaaagatgtataaactttaatctactgttattaaaaaaagaagcccaggctagaaaaaagaatggtatcgtcattaaacagtcaattttgatgggaccaattttcattaacgcttccccatttatagaaatagtcggaaaacattttatagctaacaagataagtattccaattgtataaaacagccatccaaacctctctagcttccggtaatcaagcaacatcatcccaatggctgttgcaatcccaagaattacaaaaattactttgttcattagtaaatcatccgtatgcccaaaagcgattattggtaaaaaacctaatcccatagcagctactaataaaataagtaaaaaccaatccacctttggcttatgaagtttattaagttcttgccctagtttaatcggacttcccatttgttccaccgctttattttcagcgacttcctcgctcaaacctttttctatccatgtgttcttcgcctgttttaggtgaaaatctagttccgttgctacaaaatctttcgcttcttttgatttaatataattcgtaacttcgcttacaaaacgctccccttttttattcaatttctcctcactcctgtactaagccttttaatataaattgtaccttcgtagcatttttttctgcctttcgcagcatctttctccctttatcgtttaattgataatatttcgctcctgcatgatcccagctagattggatcaaacggttctgttccagacgatgtaatacggtatataaaaacccttcatttccttcgaatttccgaatccctctccctcgtagtagctgtgacaattcgtaccctgttttttcattactgaggagttgtaaaatcgctaaagagatgtcctcttccttctcgtttgaagcattgattttttcgcgcacctgctttcgatgttgatcagaaaaactcaaatgtttaaacgttgtattctccattgattttcgcagaccttttaattgatcttccatttgattattcctccaatcctttcttcaaaagctccttcgcttttttcagtctcgtttttatcgtattttcctttacgtctattactatagcaatctctttaattgataactcttcataataaaatagataaatgacttctcgatattttatcggtaaattcattactgcagaagccagttcacggtcctccgcattttgaatgacagtttgttcgacactaccattttgaacccccatataagcagcttcatcctctgtcacgatcaccttgttgttataccaactttttatatagtccttacattgattaatcgcaattctccataaccacgttttcacattcgacttccctttatatgtatgcagaaatttatagcatttcacaaatatatcttgcgttacatcctcagcaatctctttattgtttacatatgaatacacaagctgcaggacttcttgtccatacttgttcataatttcatcgataaggagttccttatcttctatttcaaacgcttctaccgttaattcatccacatcatttcctccttcccatatattagacgacgcactgtatgaaaaagttttataaatacataaaaaaatacggatggtaatgtccataccgtttttttatgaatatttatttacttcttttcccctgacactaatgctctgcttaaaaacaggaattttcatccatatatcttgttccctattttaaaacataatacaattaaaatgtaacttaataagctataactagtaggtgtggcaatcatctcttccattttgaaaaaggggggaggtgataatataatcgcgatgtttataattaaattagtgtatggtatcctaaccggagctggcgttgtcatcggtagaagatacgtcggtccgtggctaatttctgtatacaaaaaagcgagaaccaccctgcttcgtggaaaaggtaagggcggttctcggctaaaacgttaatgtaattgtcttataaccgcacctactaccaccacaatagcaagttaggttacacaaggcagaagtttctcaggcttctgtcttttttattttatgcaaaattcacactacatactctatcatcattgtaacacattttatttatttttagtcaagagaaaaaccacctaaagggctccccttcaggtggttctctattttacgctaacgcagctagactttttcaagttcagctgtgccgctctcatcatttatagcaccaataaagacggattatgtacccgcttcataacagtatgagtaaacaaggaacaacacctattacgaatataaaaaatcctctcactatatagcacctatgttttcagcaatactctattaccatcaaactaaatttgtataatttaaactacagaatagcaagctaattttcaaatatcttcttgcgcattatcctaaatttattatctatttgtatcatgcttataaataaaagatatcctaccgacgcaccgagcatatttatagcaatccgccacacatcaaaaacatcagacaaagttagtaaatgtaatatctcccaaacaagaaaggtcataacataccacttacgagctttcttatagttagaagaatattccataaaaaaagaaccacctcaaggctccccttcaggtagttctctattttacgctaacgcagctgcttgctcttgttgatctacaggaattacagcatctgttaatgctttttctaattctgctgtgtatttcatttgctcttctttgctccagcctagtttcgcagccatgtagttgattactgcttctttccactcgtatacccagtggatattgaagaatacagtgcctctgcggcgtacgaagaagtcaactggttttgctgtcatttcgtaatccattgcgtatacaagagggattagaacgtcaagcggcatgttgtattctttcgcttcgtctttatgttttttcgctaagtcaaatagtacgtcaacgttagagccgtagaatttcgcgaattcttctgcttgtgctgttgttaaaccatatttcgtaccttcgccagcttttttcgcaacaaatgctgggaatccgtgtgaaccatctacatgtccaccagagattggcatatgtttcgtgtcgctcttcggatatgcgctatgaccttctttttgtagtaagttcgttacgtagtctactaccatttcagccattttgcggtatcctgttaatttaccacctgcgattgtaattaaaccagattcagaagtccaaatttcgtctttacgagaaatttcagatgcactcttaccttcttcgtaaattaacggacgtacaccagcccagcttgactcgatgtctttttccgtaatttttacgcttgggaacatgtagttaatcgcattaatgatgtatgtgcgatcttctgttgtcatttgtggtacagctgcgtctttatcgtagaacgtatctgttgtacctacataagtttttccgccgcgaggaatcgcgaataccatacgtttatctggtgtatcgaagtaaatcgcttggcctaatgggaaacgtttttgatcaattactaagtgaacaccttttgataactgaagtacttttccttttttcgagttatctttttcacgaagtgtatctacccaaggacctgctgcgtttacaattttcttaccgtaaacttcatatacttcaccgtctagtaaatcgattacacgtacaccacatacttttccatctttatataagaaaccatctacttttgcgtagttaacagcttttgcaccgcgttcaattgcttctttcattacttcaattgtaagacgcgcatcgtctgtacgatattctacgtagtaaccgccgccttttaatccttctttttttacaagaggctctttcttcagcgtttcttcacggttaaacatttttctgcgctcgcttcgttttacacctgctaagaagtcgtatacacgaagaccaattgatgtactaaatgatccaaacgtaccgcctgtatggaatggaagtaacatccactctggtgttgttacatggggaccgttctcatatacgatcgcacgctctttacctacttctgctaccattttcacttcaagttgttttaaataacgtagaccaccgtgtacaagtttcgttgaacgacttgatgtacctgctgcaaagtcctgcatttcaaacacaattgttgataacccgcgtgttgctccatctaatgcaataccagaaccagtaatacctccaccaattacgatcacatctaactcttgtttatttactccgtttaatacgtctttacgttgtttacttgaaaatttcatggtaattcctccctttgataacgaaaaaagagaccacaaactccgctatagatttcgcctctatagcgcgttgtggtctctccaaatctcctaccgaattattaacttgtcaccattataacactgtttatgattatttgaaagcttttgttgcttcaattgcttttttccatccagcatatagctcttcgcttgttttcgcttccatcgttggttcaaagcgtttgtccatatgccactgttctttaatttcatcttggtttttccaatatccaaccgcaagaccagctaagtatgctgcacctagagccgttgtttcgttgatcactggacgctctacaggaacatctaaaatatcactttggaacttcattaagaagttatttttaactgctccgccatcaacgcgtaatgttttcagttcaatacctgaatctgcttccattgcgcataatacatctttcgtttggtaagctaaagattctagcgttgcgcgaatgaagtgctctttcgtcgtaccgcgtgttacaccaaacatagcgccgcgtacttcactatcccaataaggtgttcctagtccaacgaatgctggtacaacgtatacaccatcagttgattcaacgcgactcgcatacacttcactctcacttgcatctttaaacatgcgcattccgtcacgtaaccactgaattgcagaacccgctacgaaaatacttccttctaatgcgtagtttactttaccatctattccccatgcaattgttgttaatagaccgtgctcagaagctactgctttttcacctgtgttcattaacatgaagcaaccagttccgtaagtatttttcgccataccttcaccgaaacaagcttgtccaaataatgctgcttgttggtcaccagctacacctgcaatcggtacattttgaccgaagaagtggtaatcaattgtttctccgtaaatttcagatgatggacgtacttctggaagcatgctctttggtactgttaacatttctagaagctcatcatcccactgtaagtcgtgaatattaaacattaacgtacgtgatgcgtttgaataatctgttacgtgtgctttaccaccagatagtttccatacaagccacgaatcaattgttccgaataatagatcgccgttttctgctttctctcttgcaccttcaacgttatctaaaatccattttactttcgtaccagagaagtatgcatcaattaaaagacctgttttttcgcgaaccatttcgctataacctttttcttttaactcatcacaaatttcagctgtttggcgagattgccatacaattgcgttgtaaattggtttactagttgttttatcccagacaaccgttgtttcacgttggttcgtaataccgataccagcgatttgttctggttttacatctgcttcgcttaagcaagttgcgataactgctaaaatagatccccaaatttcttgcgcattatgctctacccagcccggctttggaaaatgttgtgtaaactctttttgagctgaatgaacaatttcaccttttttattgaataaaattgcgcgtgagcttgttgttccttggtctaatgaaagaatatattttttcatatcggtttcccccttatgctacttttctactatttgtattgcttccgctttttttacttgtcatataagagattgctagtacaatcacagttgcgataatcacataaataagtgctgaattttgttttccttcaaatacaacttgatggaataaacctgcaagtgatccacctaaaattggaccaactactggaatccatgcatacttccagtttgaaccgccttttcctgcaatcggaaggaagaagtgtgcgatacgcggacccaaatcacgcgctgggttaattgcgtatcctgttgtcccgcctaatgataaaccaatacttacaattaagaaacctacgataaatggatttaatccatctgcaaatttatttgcaccaattgctaatataccaaatactaaaacgaatgttccaatcatttcacttaaaaggtttgcaaatgtgttcggaattgctggacctgttgcaaatacacctaactttgttcctggatcttctgtttctttccagtgtggtaagtaatgtaaatatacgataactgccccgataattgccccaatcatttgtgctgcgatataaccaggtacgtcactccatgggaacgctcccttaaatgctaatcctattgttaaagctggattcaaatgtgccccactaattgatccaaccgcatatgctgcaaccgctaccgctaagccccagcccattgtaattacaatccaaccagaatctttcgcaaacgacttctttaaacttacaccagcacaaacgccgccaccaagtacgattaacaacgcagtccctattaactctcctaaaaatgctgacatagtatccctccacaatcaatttaaacgcttccaaatgtgatagaggtaaaatgaatggccattcgtttttgtcaaaagaaaaagacccacagcttgcacgcttctatataaatttatatagaaacaatgaaatgtggatctctacttttctccgtcacgtttattaacttgtctataatgttaaccgtaaatgaaagcggtgtcaacgaaaaaattcacattttcgtcactttttttggtaatgtttccatagttcgcgttttgatgtcgtaattgctgtcgcaccagcgtttaaagctctttccacatcttctacagtacgaataaaaccacctgctaaaatcggtacaccagtacgctctttcacttcagcgataacgtccgttaatgctccaggaagtacctcaatataatccggtttcgtcttatctaaaagattgcagctcttctccatcgcactcgaatcgattaaaaagatgcgttgtattgccacaacacctttttgcttcgccttcataataacgctcgcctttgttgaaagtaacccgtacggtctaaactcctgacataaatattccgtcgcatgcccatcactctgcaaaccatgaattaaatccacatgtaaaaacacctttttacaatattgcttcgcaagcgatataacactcttcaattggccgacatgaatatctaaaataacaatatattcatacgaactatgtaatagcttttccaaatctttaatttgcctcactgccggcaaaatcttctgttcatgaaattccattctctatatccccttctttatgtcatcctatcctttatagtacacaatttaagtgaaaagaacagccagtgtaggggatttctttcaaatctttcctctatctatatattttcttcaacttatccgatcccataccacctataatcatgaatgcaaggggtaaaagattcattacatatggtgcatctgctacaattgtaatacttgctccagcaaacttatttagcatccatacaacgatttttgcaataaacaaaaatactcctatcataaatagactatcaaaaaacaccttccattttggatacgccaattgcttactatcttcaattactttctgcgtcaattcttcatcaccccttagcagttcatcaattgtaataccgaacagatcacttaaatgaataataatttcaatgctcagatagttctttcccgtctcccatttcgaaacagattgcctgctcacatgaattttttcagccaaatcattttgcgaccaatttcttttttccctttcttcttttaaacgctcactaaaaatcatactgtgtttatcacctctctatgcccattatgttcaaataaatgatgaagagtaaagctagttatcgttgcatttcctgcgcaacttatgcgttacagcttataatggcgctcttttatatgtatcttccctatactatgctccaataataatttcccgaacaataatacaaggaacggatactaataaagtgaaactttaatcaaccctcaccaatcgggcttttacggacagcccgcccccccacctaacttctttgcttccgctgaattttgaggtggggtcttactgcccggcaaatagcgggataaagactagattaggcataaaaaatacgccatcccttcttatcagtctccagaaagaataacgcaaattttcatttttactcatcatttttcggactatatgaaaaccccggatatttcacaacaggcctcttctccttacgcagggaatccattacttgcgggccaacatgtatattactctccactatttctttaggagtcagtgccatccattgatttaacgatacatcttcaaaacgattacttctgaacatctctaaaaaccataatgtttcggtacctgtattttgaatataatgccccgtcgcaaacggtacatatccgacatcgccagctctataatcaaatgtacgagcggtaccatttccaagaaacacagtcattctcgcttcccctgtcaaataatattgccattcatcattattcgggtgccaatgaagttctctcattccgccaggctcaacctcaacgagcgctgctgcgattgttttggaaatagggaaatttgtagaatctacaattcgaacgctaccaccaggcgtcttaatcggattttgttttaacaattcatgtttaaatgttaaaggaacttctcctttcggtgattgaatttcctgactttcaagcgaacctggcacctctccttgataaatataaacttgatctgaagggatagaacgaaaagcactctcaggtactccgaaattagccgacaacacttcttttggcgtatgcgcaaaccaatcagaaatagctaaagtagataaatcagaaaaatgcccatcatcgaaaacgagtagaaattcacaatgttccaatccttgaatggaatgtggaataccaggcggaaaataccaaagatcacctggtccaacatcagcaataaaattccgtccattttgatcaacagccgttatgcgtgcccgtcctaaaagcatatacgcccattccgcttctttatgccaatgtagttctcgtactccaccggccgttaaactcatatttactcccgcaatcgtcgtcgaaaccggtagttctcgaacagtaatctcccgagaccacccgccttgtttcaaaatcatagaagtgtccgagaatgaaaacttcaagttaggaactaatcctgcatccgttataggcggaacaagcatattcggattttgaatatcccgcataacattacgaggtccagaatcaatcgtacctgctccgtcgctgcggattggttgtggcacattccctcccgcttcattaacagtacgtttcttcatgattacactcctttttcatccaattagtaagtaaaaagcctccatcatagtgtatgaattgggctttggatggttacagttactatggagttacatcatctgcctatcattatcgttttgttcatttctcaacttatactagtatgcttagcgcttaggaagacaaaaaaataaactagaactaacaaaaaaccctgtaaaatttattacagagtttttcaccaattatttattgttttacatatcgaatacgaacattatcgtccatttgataaatttgtaatgtgtttccataactaattcctaactcttcacttacaccaactgcacttacaaatacccctttaaatactttatttttagttggttttactaccgatactcttcgctgcctcttcaaacagtttcgaaccttcttgtgctttacttactgattgatgcattttactttcgtcttcctgatctaatgcatcaaagagaagttgaaaacaatccgcatatagttccatcgactgctttatcttcgcctgttctccctgtaactctggaggcgcttgtagattcttcagctttgtagcagttgcctttgctccacctaaactcagttgtacttcacttttcttttgtttgtatgattttacgtctgaatctgctattccttcaattaatttcattgtattttcaatttgagtagcactatttatgatatctgccttgtacctttcaacatctgaaccagttaccttaccagttgaagaactagaagaagttgaattatttgaagaagaacttggttgactacttgatgaactactgtttgtaccttcacctttcgctacagataagctatcctctttcttgccatcagttgacttactctctttttcagaagtcttattctctttctctaccttttgcgtttcttctttctttggttcagctttcttaccatcagtttcaattgtaatacaaccactcaataacataactggtaacgctaaacttactaatttctttgctttcatgattactaatacccctttatttgtaaaatgtagtgcaaacaagttaatatacttaactaataaattccccccgaataatttattaaaatctactatccatagatttcctgtatattcataatctttccatatataagattttacaaagaattacatatttggtcaaagggatttatgtagtttttaaaaggaaatttactaaacgaaaagaaaattttaatcacaaagaaaagaagctaacaataaattgttaacttctcagcttaaggaaaaaatagtatctttccttatcttctactatctagattgtggatgaaccatataccgctccctcaaaagaaaaaagctaccacctaggcaataatttctactaagtggtaacctttcaaaatttctattaaagcaataccgaatctttatcactatcctgattacgtttctcacgctcttcttctaaacgcttcatatatacttcgccttctttttcgataaactcattatccatatcttgctcttttttcgaagtatataaaaccatgtagccacttaatacaatcccaacaattacaagataaacccaccatggtaaagtttccactctacttcattcctttccttagacaagccttattagtttcactctatgaggaaagaagtggatttatgcttaaaatttttattgtggatgcttcgcgaaaaatgcttgtacatattccataaactcaattggttcctgacgaaacggtgcgtggtatcctttttcaataatatgaaacgtactatttgcaaatagcccatgatacagttcaccatttttccacgaaacactcttatcatgtcgtccccatataattaaagtcggtgccttaattttatcagcttacgaaaatgcggcgctctcgcattttcgtaagctgatcataatgctctttatcatcacgactattttttacttcatttttattatacttcgtaatctcagttacagtttgtaagtccgtcgatagcggtggtacttcataactttctttttgctggaaagactctatccctttagcatccgccaagatgagatgcgtcactgcatccggatataaatacgctaaattgagagacatctctccgcccatcgaatgaccaagtactgcgaattgatcatacccgagcttcttcattaacttataatataaattaacttgcgcaggaaacgaatactgaaaatcaactggcttagaagaacgtccaaaccctaaaatatcaaccgctataatcgtgtgatctcgtacaagttccggataaatatcactaaacccatcagaagaaccaccaaacccatgcaacatgagtaacggaggtttcccctcaccaatttgcttaaaataaatcgtctgcccatcaatttgcgccatactctctttcgtattcagcttcatcataacagtatctttcacttcttcaaccttcgcaatcggcttatcaacgaagttacatacgataagcaaaacaagcacaataccgctaatcaaataaaacttaaaccgtttcaaagttcccgtctcctttcttgagttgctatttaaagtttttacattttttggttattttatgttctctttttaattgtaactaaaacagttacaattatactaaaaaaatataactcacttctattactaatggttattctgtaactattatagttacatatttaaagtaagtcaattcttttctctacatggcctgaaaatagaaaaagggacttcatgttgaagtccctttctttgttattatagttggcttactccgccgtcgcctttattatctgctggtgctccgcctgtgtcaccaatgttaacgtagtctggtcttgctggtgctccgccaccatctcctttattaagtgcaactgaattaaaatcatgaaatcctagagataaagtaaatgcgaaccctattaccgttaatacaatttttctcattattttaacgctccttttatcatttgtttttttcttgcttctttactcatatgataatattcgctagatttttcatgattgttttcataataaaatttatctgctaagcgttccgtatactcttgaatacaatcaaataattcttctttttcaaaataagaaatcgcatctaaaataacattttcaaattcaccagtagtcgcattcattttatttaaaatcatgaatcggtattgatactcttgattttttaactgattacaaatacgtaaccctttatttattaacgactctgctttttctaattcatttagttttaggtattcgtctgattccaagtatagtgctcgaaaatgattaggagatttctttgttacttctgataagtgacggatagctaactcagataaattttgattcgcgtacaataaacctaaattatttctaaccattaatatatatttttcatgattaacttgttggaaaacattcaatgctgtattaaatgtttcttcagcgaactcgaattgttgtaaatcaatataacacaaccctaacatattctcgcacaacgcaagattaatctcataacctggttgttttaaaaaaaactcttttgctgtttttatttgatcaatcgctaacatttgttgatatgattggttataaagatatccataacgataatgaaactccgcatgttctatcggatcggcaatatatttcaataacttctcagcttgctcatactgttctttcgcttcattataatttgaaattaatgtgcaatgaaaccctttaaaaaagtgatagtaataagctagaacaccttctgccgggatttcaaaagattctactttatcaaaactatcttctctaaccccaatccaatcaactaatgcaccatatctaaaattcaacaacgcatgataaagcaatacatcctgatccacgtccaacccactaatcttactttcaatctcctctttcatttccgtggccttctctatattttgctgcaacattacacgataccaatcatctaaagaatgtttcatttgctcccgcgttactacatctgctcccatacactcgcatccccttttctccaaaattacaaaattaggatttttatacaattattaaaattgtatattaccactccttttctatgcattgaaaaataattatcagaaaatttaatattttaattaattacaccaaagttttcctttttaataacttgagaaataattgtcagaaaacttactaggataaataaaaaagcaagtagttccagcactccgctaaaactacttgctctcctacttactatctctatttttactctttaataaattccttcgtacttctcactgtatcaattggacgaactaatttttcaatttcttcacgttttggctctaggaatggaggtaaagataatttttcgccaagtgtttcgtatggctcatctcccataaatcctgggccgtctgttgcaaattcaaataagatttgtggtgcaactcttgtgtataatgattcgaagaagtgacggtttacatagccagatgaaggaagtccaacgctactgattctctcaatccattcttctaatacagcgcgatcttctacgcggaatgccgcatggtgcactgtaccaaaaccttgttgtgcttcaggaagaactgtattatgttctacaatgacagaagcaccgtttccacctttattcacttcaaataaatagaattctccttcttgcgcaacctctttaaataataaaactttttctagcacttctttgaagaaactaaagtttgcaatacggatgaatacagggcctaaaccagtaattgcatattctaatggaactggtccgttttgccatggtgtacctgattctataccgttatcaagctcatctgaaattaattgatattgttggtcatcaaagtcaacgaaagaaagagttttcttaccaaattgctctttaattcctgtatgttctacttccaaacggtcaaagcgtttcacccaatacgctagtgctgcatcagtcggaacacggaatgaagtttttgaaatttcattcgtaccgtgtacacctttcggaacacctgggaaatcaaagaatgtcatatctgttcctgcactacctttatcatctgcaaagaataaatgatacgtttgaatatcatcttggtttactgttttcttaactaaacgcattcctaaaacgtgagtgaaaaactcatagttcttttctgcactacttgtaatcgctgtaacgtggtgaattccttttaattggttcattttatattcctccaatgttttttaatttatattttctctcctattacttctcttcaataggtgctaaattcgcttcaatctctgcacgctgatcttctaagaacggtggtaaatcaagtttttctcctaaatgttccacatctccatcaactgtaaatcctggtccatctgtcgcaatttcaaaaaggattccgtttgattcacggaaatataagcttttaaagtagaaacggtcgatgattcctgaagaatggaagcctctttgtttcacctgttcttcccaataagcaagctctgcatcgtttttcacgcgaattgctaaatggtgaatgctaccgcggcccggtttttcagtaggaccatctaaatatttcacaacgatttctccaaaagcctctcctttaatggactggaaaattgcttcttgatcatttcggctaacctctgtataaccgaacatctctgtaagtgtactcgccattttatcaagtctacgaactgtcatttctacagaacccattccttgaatttgatgctttgtaggaacttctgatttctcccaagtttcccagtgctctactttttctccgtttgaaacgagtaatactaagcgaagaccttcagcatcctcaaattgcaaagcaggacgatttgcatatgttgttatttcactatgtttcacatcaaatttctcaaatcgttctttccagtaatgtaagctatcctctgaaggaacgagcaatccaattcgagtaattgcatttgtaccgcgatatgttcttcctactaaaggaatttcaaaaaatgataattccgtacctggacttcctgttttatctccataaaataagtggtacattgacggatcatcttgatttactgtcattttcacacgacgtaagccaagcacatttttataaaagtgattattttcatttgcatttttcgtaaccattgaaatgtgatgatgccctttaattttatacatttgtaattcctccacttcgttttactagtcaagtgatgataaaaaaataatatgttttttagctgttcaatttattctcattatgtttttgtaaattcatcttggtttttactgcataagttactttcgtttttaactcgaaaacaactgagtgtatgtttttcatatgactcaatcgctttcgttactatcactttacaactcaagtgattaaaaagcaagtaatttatctcaaattcgagatatttttttattaaataacattttggactaaaaacacgagaaattcttggtttgaggacattataaaattcataagttgatggatgtgagatatcgccagcatttttgaaaaaaacacgctaagagtatgcgagattttatacagttttttcgttaatccaataacagacaagaaccctaaaaccgcaccagaataggaatgtataaaaaattgcatagattgatagaacaaaaaaaggaggttcccttgtgagagtagggttcctcctttttccttgctaccgataataggacgttatgttaactgatcatgtataggatattcatataggaattgtttctatcaatgctgaattatacaaagaaggaggcatgataatgaaaaaagaacaattaatattaattgctagtcttactcttttatttcctgtccttgaatttttcttccagaaatatgattacttcaatttttacgcacatataggtattatagccattgctgtatcaactgtcgtattcacactccattatataaaacaaatttattggaaattatcgatcgtatgaggaaattatgaaagaatagaatttaattgaatatgttttctattacccgtttcaagcttttccccataccttttactgcccatactagtttaaggaacactttaaagatagcatcccatacgtgttcattaataaaaaattcgtatactttctttaaccactctttcggggatttactcttacgtttaaacctttgccaatgcgtttcttcactagttttcataactaccccttctttcttaatcgaatatgctttctattagaagttttaacacctcgctataatgatgaaaagaacgaggtttatcatatctggcaatttaatcactcctaattttaaattaaattcattatataacgatttctaaatttttagttaattactagtgagaattaagcaaaatttaaacaaaaacacctatgttaggctttagttagaggttttccccctataaaatcaactatttgcgccaccaactatggggtacgcgaattactttgatattatctttgaacgaacaaaataactcctttcgaaaaacaaatgaactgatattaatcaacttccaatatcgagaattatgtaaataagctgcccatatggacagcttattgtattttttgcttaacatattttttctgaaatgctggcggtactcaatttaaaagttgatatgcccccattctagtggcaagatatgttttattagttcttcgttacacccatgcgtacttcttaactattttatttcatttttaataaagtgaaactttaatcagtgggggttttcttcaccccccactgattatcagccctcaccaatcggactttaatgacttaacattatgcttatcttaggagcaaggtattttatcggtgagtgtatacaaaccatgtaatgcttgctgttaataatgctgacgaaatcaaagctgtaagaacactatatgtttgccacataagtattgttgaccaatcgaaagcgcagcacagtatacccagagcaatcgtagcgatcaggaaaataactgttacggttattctcttttttgtcattggctgtcgctcattcgttctccttctgcgtaatcctaagagaaatagcaaaacggccaataggcaaaaaataattgtgatagacgacaaaatgatatccaaaagctgtgtgccgcttatttcatatgactgagttagattgccttctaatatatctttaacttttagtaccatgtttgtattggtatttgtgccgttgctcagcaaggagacggctgttcgttcatttggcagtatgactacttcggttctgaaatttggattgcccccagtgtgttctataatcgtttgttcggcatttacggaccaacctgccgcataatacataccgttgacagccgaaacagacatatcaccctatgtgatttttcgataaccgtgtgaaatatttcgggtatgtcctgcacgatacccatctgtatgcccatccaacgagccatatcttttgtattagaaatgatgtagcctgcgggtttattcccagcataatccggagctttaaatggagttgtcataaaaaaggaagaacggtagccctgtgccaactgtccagtagcttgagcatcttctttataaacatacgtctggtgaagacctagcggctgaaatacctgttccttcataaagtcttcatagctttgtcgcgacacaatctcaataaccaaacccaatacgtcataattaacggttccatagttatactgttcaccgggagggaacgccaattcagcatcaacgagcatttccacagtcttttgcaacatatccggtgtattgccttgtggaatattttgaagatgcctaatatttgttagaccactggtatggtgaagaaagttatttagtgtaagactttgcatatcaacaggtttcccttgatactttaatgtaaaccaaggtaaatatttttggacagggtcagtcattgagagcagcccttgctcttccaatagcataatacccataccggtaaaagctttactgaccgaggctaactcatagagtgtattttcacttgcagacacccccttttcacggtctgcataccctgaagaaaagtagaacacttcatcatcagcaagtattgagattgacattcccggcacacctgatatacgacaggcatcatctagcaacgcttgtattgccgcagattgcgaatctgacaacgcataactttgtgttgcgaatcctgagaataatataaatatcgttaatacaaaaacaataatctttttcataaactctcccttttggaaaattataagagaataatataaataacctccttttacaactacgaaactaatttttaatgtatctttctattcacctatataatatcaaataattgcgaatagttacacttgaacgaacagatggatgtaatttgaaacaactttaaagagccttgctacgtagaatgtagtaaggctcttagctttttaataatcaaaattcaataactttattatcattatacaacagccccactaagcgtattaacacttaatgaggccactttattcacactattaattatggaacgtcggtttatagaacgaacgattatcaagtgcaaagacacgctctgtgtattcgcctggttttgtgcgtcctaatgcgcggtccatcatgttcatttttgcatctaagttatcgatgtaatgcagaatttctgcttcttttactaatggtggttttgggctaccccattccgcttttccgtggtgagaaaggacgatgtgttgaagaattaatacttcttctgcatcgatttgcaattcgtctgctgctttaccaatttcgttcaccataatagaaatgtggcctagtaaatttccttctaacgtatacgttgtagaaattgggccagatagttcgattactttaccaaggtcatgtaaaataacgcctgcatatagtaagtctttatctaacgatgggtatagatttgagatagctttcgctaaatcaagcattgatacgacgtgataagctagtccagatacgaactcgtgatggttctttgtcgctgctggatagtctaaaaattcgttttgatgcttatttaataaatgtcttgttagacgctgaatgttcgggtttctcatttcaaatatgtattgcgtaattttctcaaccatatcttcttttttcactggtgctttttctacgaagtctgagatatctgttacttcattttcattcgcaacacgaatttgtttcacacgtaattgaatacgtcctttgtagtttaaaatatcaccagctactttcacgattgtttccgctacatattgtttctcaacttctggtgatacgtcccatagcttcgcttcaatgtctccacttggatcttgtaagattactgttaaaaatggctttccattgcttgcgataccttttgtcgctgttttaattaacaagaaaatatcgacttgttcaccaacttcatactctgcaattttctttttcattcgaattcctccaccaaatcagttacttttagtatagcacactacaactcattttctttacgcatatgtgttaattttataatctgtttttctggaaaatacgcaagtaaatgcgcatgacatgtaaagaatatgacttgtctatcctttgcaatttcctttataagttcaatcgttcgattcgtccttaccgcatcaaaatgcacgaaactatcatcaataataaatggataatcatgttcgaatgttttcgcgagcgcaaatctcagcgataaatataactgctccgctgtcgcttggcttagttcatgactgtaaaaacgcataccatcgttacgttcaacgataaacggttctgcctctgacggtgaaaagattttactatagcgtccgcctgttaaatagacgaaatactcttctgatttttgtaaaatacgaggaagatgaacttcatgataatagtgcttcgttttcgttaacactgtctttgcggccgcataagcagcccacttcttcacttgttcacgcacttgcgcttttttcatttcccattcatgcattaaatcgccgtacgtactaccttcttctaaattcgcaatttccatacgatgtttcgcaatacgctctgtcagttctttctctttcgtaagacagttttggacagttgtaatttcttgctttaattttccttcataaccgtcagcttcataatgttcagctaatgataaactcgttaaacgttgttctaacagatcaatttgcggcaataaacgccccacttgcttctctgcatcctcacgtttttccgctaatttacctgcttctaaaaacacctcttcatctatagactctgcaatatgccataaaccatctcgttctattagtaattgctttaattgttcttgcataaactcatattcttcttgccattccgccagtttttcttttaactgcttacaagtttggcgcttctctttctcattttgcatacggctttgtgcctcgtgtagcttactatactccgcactaccgataacagtttctagtttatgttcaaattgcgaaatcatttcatataatgaagattttcgcgtaccttgcttctctaactcccgatataattgctgcattttttcaatacgctcaaacgccggcaagatgtgtgcatacgtataaaattcaggaaacatatagcgcgttttatatgcatcgacttgttctcccgcctggaacgtttctctctcccattcctcatacgatgaaacgactttatcatacgctcgttccaattgctgtaacttataagactcgcgctcaaataacttccgaatctcttcatctttttctaactgatagcgaacagacatcgcttcttcactttgtctcccgccagcactttgctgaagtgtaaggagctcttcttgtaatccacttgatggatctttatataaaacaagggcgagaacaatccctacaaaaacaatgacactaataaataagagcgctcggttatctataaataagcttgtgaataaaacgcctgtgttaataagaagtaaaagaagacaaactctttgccactgctttttcttttgcttagctgctcctgctttctcttcatacttgcgcttcattctctctgcgcccataccgataaacgccgcatcttggaacgatttctctttctcaactaacacatttctctcttcatccgctaacatttgtttcttaatctgccttatattttcttcttgttcttctaattgctcttgcgctactttaaaacgatcatcgagctgtgctttttgcgtttctaattcgcgcgccttttgcactgtttgcgtaattaactctttcgttgccaaactcatatcaaatgaaagaactgtttccttttcaaaagtagcaccaatttgttgttctagttctgcgatttcttcttttatattcgtaatacttcctgtcatatcacgcatttcttggcgtgcattttcgtaagacatatgctgcatacgaagttcttctacataactttctttttgtaaaaactcttcatctatttgaatcgaggcaatttccgattgcactgtctcaattttcttgtggagcgaatcaacttgtaattgaagcggctccatcttcgccttaattgcttcataacgcgccattccgtttacaggaaactgcccgctctcgttctctaacactttctcgtgcgcacgcttttcaataacgagaggctcaagcgctgctaatatttcataatcttgcttccgcttttctgcattctctttttccacgcgaacagaagcaagtttctcttcactttcttttaactgctccacttgcttttcatacgtgccaattttcccttgccactctttcatcttctcttcaagtttcttcatctcttgcaatgacacgttaatttctggtttacgaccactcggcttgaagcgctggtccatttctttttctagctttttatctaactgcaatagcgcatcacttccgactgcacttgccgaaaataaataattgccaatatctgcttcgccaagctgatgaatgttttgaaggccatgcatatcaaatgaaaagacagattcaaataaattttcattcatcccgcttaatatatcgtttaaaatttcttctccgcccgttttcccgtcttcaaaataaacggtcacctcgccagctgccgtctttggcaatcgctcaattttcaaacgaccgtactgctctgtttgcacagtgatcgcaccgccatacttcccgccttctttcggctcataacggcgctgtcctctcgtcggaaaaccgaataaaatacttttcataaatgagcgaattgtcgatttccccgcttcattttcaccgtataacactgtcagcaaggaaagatccatttccacattttctaattttccgtacccataaatatggagtttttcaattctcattttttatccctctcttgctggaataattgttctaaaataatattttctgcttccttttgaatctctttcttctcttcttctgtaaaagattcaatactattacgcgctacaggagatgtccaaatagtgcgcaatactccgtccatattagtgaaagcttctaactcctttagcacactaccgacgaaatgattttccgctttcaaacgttcgatttccgcaaaagaaaccgtctcatttttccacttcattgcatatacgaaatcttttcgctcttctccagatgctaaaatgtgaaaaatctcttccacacgcttttcgtcgcgcaaataaggtgaaagtgggccttgtcctgtaaatacgacagttaatagcgtaccttcctcttctcttcggcattcattcatcgcagtagatatgcttgtcataagttcatcaacagtgtcaagtccatcaataccaacctcgatttcgtcccatacaacatctgccgtatggaaaaatgaacactgcgatccttttttcgtaagttcaataaggtatgcacccttctcgcctgtttccttacgatgacgaccttgtatgttccctggataaataatgtatggttcttctgataaaatttcacgtttatgtatatggccaagagcccaataatcaaactgtttttctttcaactcacgaatttgaaacggtgcatagcgattatgctctgcatctccttccacactaccgtgaagcataccaatatgaaaaggcgcatcactcattttcgtatactgcgctgtcatattatccgttaccgcttgctgcaaataactaaacccgtaaatagaagctaacaattcaccatttttataaaatgatttctcttctacataaggctccgtaaatacatgaacattttctggaaactcaattgctgcccagcttccccctaaatgatcatggttaccgtgaataataaaaacagggatatcgtattgcgaaagtctcttcatttgctcacgcacaaacacttgcgccctcaaacttctcgtctccgcatcatacaaatccccagctagtaatacgaaatcaacgcgctcttgaatcgctttatcaacaatacgctcaaatgattcaaacgtactttgcttcattctctcccaaacagactgggcaacattcatctccatccctttaaacggactatccaaatgcaaatcagccgcatgtataaactttacttgtttcacaaataacgatcctttctatctttcaaaagtttcatcttatcaaaattaaaatcgctgaaaactaataatcaccgagaataaaaatattctcgatgattaaagtttcattctattttaccacgcaatgtcatatatttctttgcatattgtagcgttttatgtcaaaataattataagattctgattttaaatattggagggaattttcatgggagtatacgttctaacagtctttgaaaaagatggttcaaaagcattagacgaatcattcgaggcggcaactgaaaaagaagcgaaagcaaaaggtgaatctatcttacaagaaaaaggattgtatgaaaaaacacatcgctgtacatctactgcaggtaagctcgttttattccagcgctaaaaaaagaagcgtcatccgcttctttttcactctactatatcttcgtcacaccacgtaaacaccacatctagaatgcgattaccgatacgtacgcgtttatcccatttacctgtttggatctgatgttgcaattctgctttcatcttttccgtccagtcgtgaatcgtttcactaccgtcgtacggatatacgcctggaaactcttcctgcagtaaatgcaagctctctgcatcaaaatgaaaatggaagaagtagtttgctgtaagcgatggttcttgcaatcgtaaaaaatgatcatcaatttgctttctatttcgatagaaagtaaagatattcactttaccgctcgtaatttggtcaatttgaatttcgtgcttctctataatcacgtcttgtccacctcgttgtatactatctttagtatatatgtcttttgcaacaaagttaaccattttcgcgcgaaattcatttccttcattataattcctgtacctccatattcaatcaggataaataaaaacaaagttgaaggggagcgatcacatgtatttcggaagcaaaggttggtatgtaaaagaacttaaaaaattaggtatccgtacttatgaaggtaaaaaactagaatcttatcgtacgcatgtgttgtctagtttacttgagagaatgaagaaggcttcggcttaatagaatagcaagaagtaaacctgaatattggtaaatgataaaaaacacctcctaaattcgcatactaagtatgcaaattaaatggaggtgtttttattagtttcactttttcaggggcgcttcagttttcataaaatattttttgtttccgctgaaacggataagttttaatctcagctgtatctaaattttcatggaataaatgaatagctataatttgtctacaatcgtaagtatggtaataatatgttccagattccatacacattgcactcgtatagatggtattatctaatgttccgtcttctgttattactgaccctttaggaacctcacaatttgataagatatgaaaaatagcagatatcccctcttcttcgttctctataccttgaatgttttgttttccatatgctgcccgcacaaatcttgatggcggggtaaaatctccaggaagtcccatcgttcctgaaccttggccaaaagcacttaatggtacatctccccactccgttggcgcaaatggctgcgatttaagtccaatatattgtcttaaattttgtaaatgccaattaaactccggactattagtcatcactcctaatggattgtcatacatttttagtccatcagttgtcggctcaagtacaatacactctccccatttatctgctaaaatccaatgtagcggcggagtaattcctaaaactggtaatggtatatctataagggaaatgttatcaacagatttttttaactcttcaacagaattaaattgcgtgaggctccaagctacaaaatcaaatggcgctaaattcgttttatggttatctatactgttactataagtagcgaatcccgggaaatagagagtggcacacgtcataccagcttcatttactccgtccgccataatgacccttccttcatgattaattcccattccgacaacagcctttttcgctcggatagtttcaccagttatattgttccactgataacgccgaggaatgattattacttcctgattcatatctaatgtgaaatccattgttctcgcaaaaagatgttggaaatttttagtttgtaacgtcaaactagtacacatgaagaaatccccccattttatagttatatacacattttataaaattctgataaatacgtaaattaaaaaccctatttatcactaacaaagtaaccatccaaactaaaaatgctataataaacccaatcaaactaagggggcaaattactttgcttggaacatgcattcaatttcataagtttggcaatccaaaagacgtattacaagttgaatataaaaatatagaaccactgaaagataatgaagttttcgtccgtatgctagttagaccgattaatccatctgacttaattcccatcacaggagcgtacgctcatagaattcctttacctaacatacctggctatgaaggtgttggtattgtagaaaatgttggcgcttttgtttctcgagagcttatcggtaaacgagtgttacctttacgcggggaaggtacttggcaagaatatgtgaagacatcagctgattttgtagtccctattcctgattccattgatgatttcacagcggcacaaatgtatattaatccccttacggcgtgggttacttgtacagaaacgttaaacttacagcgtaatgacgttttattagtgaatgcttgtgggtccgctattggacatctatttgcgcagttatcccaaattttaaatttccgattaattgccgttacaagaaataataagcatacagaagaattactgcgccttggtgctgcatatgtaattgatacttccactgccccgctttatgaaactgttatggaattaacaaacgggattggtgcggatgctgcgattgattctatcggaggaccggatggaaatgaattagctttttccttacgtccaaacgggcattttttaacgatcggtcttctatcaggaatacaagtgaactgggccgagattgtcacaaaagcaaaagtgcacgcaaacatatttcatttacgacattggaatgatgaagtgtcaccatataaatggcaagaaacgtttcgtcacttaattcgtttagtagaaaatgagcaattacgttttatgaaagtccattctacgtatgaattagcggatgtgaaagcggcagttgatgttgtacagtctgctgagaaaacgaaagggaaagtgtttttgacgagttattgaatgccataaaagaatctcttttagtatctcggcttcaactacctaaaaaataacattgtcaacacaacttaaattggttatcataaaaacgaatataacaggagatgagcagatgaatatgaacgaaaagaaatccttttcaaaagtttctcggcgaaaattagtcgatgaagtattggaacgtctacaagagaaaatcttttctggcgagtatgaagttggtgatcgcctccctacagagccgcaattaatggaagagctaggggtaggacgttcaacgctgcgagagagtataaagatattagtacatgctggcgtattagaagttcgacaaggacaaggcactcgtattgtctcattaaatacaacgcaagattcatttgaaaaaagactgcaagcagctaatataaatcatgtgtatgaagcacgaaatatgttagataaagaagtagcaatgttagcggcacaacgccgaagcgaagaggatcttttatatttaaaaggacatttgaataaaagaaaaaatgcccttcaagaaggaaattatgtagcatacatagatgcagacattcagtttcatctagccattgcaaaggcgagcaaaaacgaagttctatttgatttgtatcaatctttcgtacctgcccttcgccatattttaagtcaattaatattacatacagcgaactatgaagacaactctggcattcatgaaaagttattccaagctattttaaagcaaaataccgaagaggcgcgaacatacgctgttcaaaatttggagctgaaataagctccttatctattacacaaaaacgtcagatgatatactcaataacatctgatgtttaagaaaggagaaaatgaaattgaaacagcaagaacgaacttatttgtatatactagcactattttttgtttccattaatttacgtatcggaattacatctgtttcacctttattagaaacaatccgacaagacttaaatataagcaatttttccgttagttttttaacagctattcctgttttttgtatggggacattcgccttactgactgggaaggtaattaaaaaatacggggcagaaaaatcaattatgacttgtcttattttaatcggcttggcaacatgtatgagagcttttaccttttccatttccacattattcgcgagttctttatttatcggtattggaattgcacttgcaggtcctttactatcaggttttattaaagaaaaattccctacaaaaattggcttaatgattggcatatattcagtaggtatgggaactggcgcttctttaagtgcaggtttaacaatccctttacaacatgtattaaaaagatcttggaatatggcactcgctttttggggtgcactaactattatcgctattatgttttggtatcctgttatgaaacgaaaaaagaagacgaacacacaaaataaaagaataataaattgcctttaagaaataaaaaagcatggttatttacaatccttttcgggctacaatcaggaatcttttattccattacgacttggcttgcgccggcaaatcaaagtatgggtgtgagtagtaagcaagcaggtactcttataactgtttttaccgtgatccaaatgatatgtagctttttaattccgacattagcggatatttataaaaacagagcactttggttattagggagtatatgctttgtaatcgtaggtttatcgcttatgatttacccactaactacaccatggatcccttctattttactaggtatcgggctcggcggcgtatttccactcgctcttatgctgccgctatatgaaacaaaaacttcagaagatgcaagtgcatggactgctatgatgcaatcaggaggatatattatgggcggattcattcctgtcctagctgggatagctcgtgactattttgatagttatacgcaagtttttattataatggcacttttaagcttaattttactcctattaactttagtcatgaataaaaggagaagaaatgcagaagaccttttctccgcttaaatttaaaatgttaatatatggtataatttaattaaaaaacgaatggagcttctaacatgtggttcatttcggcaatttggcctattatactagtcgggggaattgtagtatttgtaataaaaagattggaacataaatataagcacggcaaattaggtaagaaaaaatcaaaaaacactcaaattttattagacagtttaataccaatggcaatgcttttagggtgtttgatcggtattattgtcggcatattttctcctgattctttactactttcaattagtttaggatccggaataggctatttatttggtttttttgcctatgaattttatagcaagacaggaaacaatttttcctaatccaaaaggaataagcgggacagtacatagtaatcatatgaaatatgtaactgtcctttatttttgcatcaatgttatcaccttacctttcgcctactatacacctcttttattgatttttctctcctcccctttttgcatatccgcttttttattttcattggatctatatccaaagtaaagtagcgcacatgtaataacagaacctacaatgtatcctaaaaaacatcctaaccaaaacataaaaattgcccccaatccattataaattttatgtagtagacatctgtaaaacgttctcggtacctccgttttttattacagattggaaaatccccttaaccattccatccatgaacattctgtcttctctattgtgattattatctataaagttatttataccactaattcttccattatctcaaataacaactttattatttattataaagtttgcactcacactacatatatgtagcatcactgtctctttttcattttacccttgcaactggagtttacttctacaacttaaaaacaaaaaaaaccctcaaagcataaacttcaaggggtgagcctgttttttatttacttatatacgtacagctgtaccacttacagcaaccattaacattccatcacgaacaacttcataatctacgtcaataccaacgatagcgttcgcacctttttgtcgtgcaagttctttcatttcatccattgcaatatcacgtgcgtcttttaatttactttcgtaagcaccagcacgaccaccgacaacatcacgaacggaagcgaataaatctcggacaatgtttgcacccataatcgcttcaccatttacaatatcaatatactcaataatttctttaccttgaattccagaagttgttgttacaatcatgactgacactctcctaataagttgtagttttaattagctttcttatgtctttattatgacatggaaaaagtaactaatctattgaattaccttacaggagtgtgacaattttgtaataataaaatgcgctttatgtttcattttaataaagcgctttaatatttggatacataaacgagtctctattttctttccaatccttttctacttctttaaaagttggtcgccctaattctttattattttcatgtttactaaaccattttttcacatactgatctccatttttattttgaactgtgcaaaggaaactattactactatcctttaatatttttacaatcacgaatagacacctcttcccttctcaatatcataataggacttgatcttttactataagcccttcctctcttatagtcatacgactcctcggccgcgccaaagttgtaagatcaaaaacgatattcactttgtttacattttatttaaagaaatcagagttataggcattatgcttatcaaatattttatagatttctaacttatcatctaattttgcatctactaaaattaatatatttccatcgtaaatatattcttcatactttttagcatggtcttcagggattcctaagccgataaatgctcctattaaacttccagctcctccgccaataccggctcctccaatagctgctgcgattggtcctgctgctacaattggacccattccagatacggcaagtataccaagacctgttaataaaccaccgagcccgcctgctactcctccagctacaagccctgtcgctgaaaagatatctgctttatgtgcagtttcgctattcactttttcacccgatttttcttctagatgttcaatttccttttgatctttcgcaatagctgaaatgttatctgctgaatatcctttatcatttaattcattaataacgagtgctgcatcatcaattgttctaaaaacacctactatttttctatctacattcataactattaacctcctaaagttttatataatgtatttttatttttcttcatttctgtatacactaattttcttattaacataaccatttatgaaaaaagcgaatagtaaaagcactacaagtgaactacttaacaagtaaattaaatcaaatgtaatattaatcatcatttcattcatgtataccaggctcctttttatttaaagtaaaagtatattttgatagactaatctactaaacatagacatcttacaattcatcttcagtcaatctctttgtagtatatgtatacccttcctaaccttttctaaacgtaaaaactataattatattttttcttatttatgtgtttaacattttttaaaacgggtatgtttatattgttatgcttactatatggaaaggaatattacgatgaacgccattcactctactactatttcttataatgaaatacctacaataacgcagattcatcatttttatgctttaatgacaacatttcaaacgaatgtatttataggtaaacacggagcacttacttctattaaaaacttaagcactctagtatcctttttccttactgtaaaaaagagagatcttgtattatttatttttgaaggaatagatgcaaaaagagctttaagaacactcttcccttcttagaatatttgttatcctctattccctcgtttactacctttcatatatgtttttatatttcaaaatgatttcccctattaaaaaagaaccccctaatacaatagggggatttctagtttagccttatgaaaactgatataatatatattacgtttttcattctttaaaatagaaaagttttaataaccttgaaggtaggaatttttaatgaactcgaaagcaaaatttagtattcgctacaaaattatggctggttatttagttatcattttgttcttacttgtttctttcattatgttgaacaatgagatttctaatttacaaaaatctcgtaattttattattgatcacgattttaaagttctcaatttaacaaatcaagtggagaaagatttactaacaattgaaaataaagcgaaagggtttatcatttctaataatccaaattacgtacaatctcttaattctgcggaaaaggattacgaaaagcattatcaagatcttttctcattattagaggataacccatctcagcaagaaaaattaaaacagattaacgaaaatattattagttggataaataaagagattcacccgttaattgcaaatcataatagtaataatgtacaaacaatcgacacgactcaaattcagtcattacagtcacaggtaactaacttccgtagcactgaggagcaattaacgaaaaaaagagcagcacaattagatactgaaaataataaattagaaatttggttatacagtttattgttcttactttcttgtatttctattatcatttcactctatatttcgaattccattacaaaaacgattaaaaatgtaattcaagctattaaatccatttcttctaaagaaaaaatcacggaaagaattcatgtaaacacacgtgatgaaataaaagatcttgctcatacaacgaatcacttactagacgaaatatcgaaaagagaatggttacaaactgagcttgcagaattaattttaatgtatcaaggtgtatcttctattgagatgttaggtaaaaaaattcttagtggaattatacaaaaaacgcaaacttcttgcggagcattttatgtacgtgaagaaattgaagacactgtctactatgtgaagaaagcttctttcgccgatcaaggtgctgatattgggaaacaatccattcaaatgggtgaaggttttattggacagtctgccttagaaaagaaaagttttattctcagggatatacccgaagagtttcgttatgtcactagcggagtattagaaatacgtcctaaaaatctattaatcatccctatcttatttgaggataaagtgatcgcagtaatggagttagtaagtgtaactgagatttcagatttacatcaagatttaattcaacaaaccgttgataatctaggtttaacaatccatagcattatgggacgtatgcgaattcaaactcttttacatgaatcacaagcaatgacagaagagttacaagttcaatcagaagaattgcaaacgcaagcggaagaactacaaatgcaagcagaagaattacgaacaacgaatgaacaattagagtctagaactgaagaggctgagcagaaaacagctgacttacaaattactaaatcagaattagaagaaaaagcaagcgagttgttacgcagctcaaaatacaaatctgagttcctagcaaatatgtcacatgaattacgcacaccgttaaatagtattttactattatctgaaatgttaagagaaaatcataataacaatttatccgacgatgagattgaattagcaactgtcattcattcatcagggaaagacttacttactttaattaatgacatactcgatttatctaaagtagaagcaggcaaactagacatcatttttgaagcaacgaacataagtgacatggcagccaatatgcatcaaaactttttacatatagctgcacaaaaaaatgtcgaatttactattgaagacagtgatacgattcctgatctgttttatacagatgcaaaacggattgagcaaattattaaaaacttattatccaatgcatttaaatttacagaaaaaggatccgtttctttacatttcgattcgatagaaacaagtaatttaagtcatgatatgcagtctataagtaaagattggattacaatttcagtaaaagatactggtattggtatcgctaaagaacagcatcaacttattttcgaagcctttcaacaggcagatggcgcaacgattcggaagtatggtggtacaggattaggtttatctatttgtaaagagtttgctagattgttaggtggttggattacgttagagagtaatgtaggagaaggtagtactttcacggtatatattcctaaccttccaaatggattaccagatatacagttatccaatttagaagtcgcagcaacgatagaagatgttattcctgctgaagttgttgaagaaactatcgttactcccgaaacaaataacgtcttccaagagaaaaccattttaattgtcgatgatgatcatcgaaatatatttgcgttacaaaacgcattaaaaaaacaaaatgccaacattattactgcccaaaacggcttagagtgtttagaaatactaaaaagtaatacaaatattgaccttattttaatggatattatgatgcctaatatggacggttatgaaacgatggaaaatatccgaatgaacttagggttaaatgaaatacctattatcgcattaactgctaaagcaatgccaaatgataaggaaaaatgtttatctgctggcgcttcagattatataagtaaaccattaaatctacatcaactctattcggtaatgagtgtatggttaataaaataagtgaggtttagttggagtggaaaataagtattataattttgatccatcagtagatacggatgagcgcacgaacttagaaattgaattactattggaagcggtatttaaactatcaggatttgattttcgccaatatgctcgcacatctatttatagaagaatttgtaatagaatgcagctctctaatatccctaccatttcaaaattaattgaaaaagtaattcacgaggaaggggttttagaacagttattaaatgatttctcgattaatgtaactgagatgttccgtaaccctgccttttttaaagcgcttagagagcatgttattcctgaattaaaaaagcaacctgaaattagaatttggcatgctggatgcgcaactggtgaagaagtattatcaatgtccatcttacttcacgaagaaggattaagtgaaaagtcggttatttacgcaacagatatgaatacaaatgtgttagaaaaagcaaaacaagctatcctcccgttaaataaaatgcaaacttatacgaaaaattatttacaagctggcggtacacaagcattttctaactattattcaacagataatcgttttgcttattttaatccatcacttttacaaaacattatttttgcacagcataatttagtaaccgatcaatcttttaacgagtttcatattatactttgtcgtaacgttttaatttactttacaagtaaacttcaaaatcaagtgcagcaactattttatgaaagcttaggtcacaatggttttctatgtttaggaaataaagaaactcttcgtttttcaaatataatgccgcattatacccaatttaatcctagcgaacaaatttatcaaaaaatacaataaaaagcgtatgaaatcctctgtttggatttcatacgctttttatttcgcattcgtttgtatcataattagacacatatcatctgattgcgctttcttttgttcttccttgtaaaacccttctatctcgccttctaaatctccccattttctttctgtaaaagtacgtaatttctcttcagcctcaaattcatcatttgcaattgcttcaagaacaccatctgtaaacaatacgatttgagcgttcttctcaaaaggtataactgtctttttaacttttatttcatcaaaaaatcctaccgcacaactcccgtgatttagttcaaacatatttgtttcatcgactaaaacgtatccagaaggatgccctgcatttacatattcaatcgttctcttttctgtatctactactaaatatatcgctgtaaaataatatggaatatcgtcattctcattatgtaaaagagtcatatatttatttaaatctttaatgacaagttctggatcgattaaagatttaatcgtttcacgtaatacagacgaaataaacatacaaactaatgaagcagatataccatgtcccatcacgtctaataatataataccgtagcggttttcatcgattttataccaataatacatatctccagctaatttaaatgaaggtaagtaacttgcttcaatttttatataatcttctcttaatgggctacttaataagtttctttgtacttgcgtagctaaatctagttcattccgaagattttcttcttgttctttatgccaatttaattccgatttcaagcgtaacgctacacgcatacgtgctaatagttcaactttatttataggtttcgtaatataatccattgcccccatatcaagagcttcggccaacttattggcatcctctaaagctgtaacaaaaataataggaatatctttaaacttctcctctttttgtaatcgcctacaaacttcaagtccatcaatttcaggcatcataatatctaacagtattaaatcaatttcattatacctggaagaatcttctccaaattgaatgtattcgaaaagctcttgtgcagaattcagcgatacaagatcctgatatccggcttgctttaaaattttttcaattacaaagatgttaaccggattatcatcgacaattaaaatggacacaagttatttccccttttcttatttaaaatgtaaatctattatcattttctagtattgcatactcagttacaaaatgaaaatttcctactctaacataatttttatacagcaaaagaacaaacccccagaaatgagagtttgttctttcattctataaatttccactattaatttaataccattgctttgtcatttaaaagacgatctaattcttccatatgatttgtttcatctgcaatcatatcttctaactttacaactaactctgtcatatttaatttcgctgcctgttcttttctcgtttcataacgcttaattgtctcatattctgattgtctagcgtattctaacatttctctaacatcttctgcttgtttcactcgtaaagggattgtagtaggtgtaccacctaacgtcttaattttctccgctaaatatagggcatgtccttgttcatcactaatttcagattcaaagaaaggttttaacacttgtctatatataccagaaactgtagctgcattatggttatacataataattgctgagtattctcctgctaaatcttcattcaatccttcgattagttctttcacatcgtgtgacatttttatatctcctcctatatttaataagtaccccttttctcatgttttaaacataatgattttaaatttttatgtatctaaaaatgctgcttgcttcaatttacttatcgcttgtcttttaatacgagaaacgtgcatttgtgaaatacctaaccgttcccctgtatctttttgatttaaattttctccaaatatataatgaataacactcttttctgtgtcatttaatacgttgaaaatatcctttaaaacgagacgcctttctgcctcttcatatccttgctctacttcacctacagattcaatcctcgctaccgaactgccatcagatgaattttcaactacatcatctaaggaagatacgcgataattatttttcgcatccataatttctagcacttcctcttcggatagtcctaaatgatctgcaatctctttaatcttcggtgaacgctggaaacgatctgttagctcctctatagcaagtttaatcttcccgcctaaatctttaattcgccttggaacgtgaataccccaagttttatcacgtaaatatttctttatttcgcctactattgtaggtattgcaaacggctcaaaagcattccctatcgaataatcataccttcttattgcgcctaagagccctaacatccctacttgtataatatcctcatgcataggcccgccttttgaatagcgatatgcaatggagtatacaagatttttatagtgattaaccaatctttcctgtgcttcatcacattggttttgttggaagtctgcaattagtttaataacgtcttctttagtaagatttgtaggttgagattggatttccatcattctccacctgctctctttgtatatattttgtcattaaaactgtcatgccctcatcatgcataatttgtatatcatccattaacgtattgattaaatataaacctaaaccattttccggcaaatgttctactggtttactaatatcatacggaccaactttcctttttaagctattaaaatcaaagctaaccccattatccgcagccataatttctaatcgatcttcatatagcccgaagacaattgtaatttctccaacgtcttctttgtatgcatgttgtacaatgtttgtacaagcttcactaatagcaattttcatatcttctatatcgtcataagcaaagcccattcgattcgcaacaccagccattgttaaacgaataatagccacatattctgcttttgcaggaattttcatttctatcttttcaaatctctccatcatccctagtcaccttctttctactttttcaaaatcggaattcaaatttaatatttctgttagccctgtaatatcaaataatctttttagccttttagacacaccagtaaactctagcttcccatcatttttcttaactgcttttaataaagctataaaaactcctaagcctgtactatccatataatctacgttatgaaaatctactacaatatgaacctctttttcgcttgtaataggcattaccttattttttaaatctgatgccgtatacgcatcaatctcaccattaagttgtaccgtataacctacatcattttgcaaaatatttattgccaaattcatcatttccgcccccttatctcgaacttttactatttaattacccataaaaattagttttaaacatatttttttattttcattataaataaattttctacacctttctcggcttaacacttaaatcgtactaataaatgtttaaaacttataattttgtgtatgtataatgtataaacattatttttagggggatctatctatggaagagcacaactttaaaaagggagatttcgttcaattttcttatcgacacgatcatgctacaaaattagttggttccattattaacatactaacgaatacaattgtagttgatataagtaatagcgaggacttatctcatatagaaccaaggcaagtcgtaagaataaataattgtaaaaaggtaacgatggcttaatacataatagaaagtgtaatgttaatgagtggggggttcttcatcctccactcattcctatgtaaaatacataaaaaagcatccaaattagtttaattggatgcttttttatgtatttttatcagttcattaactttataactatatataataaacttaagattactatttattatcatacttacgctttccgcagcattctagagaagaatgtaacgattaaaataaagacgattgcacctaataacgctggaagaacaaaaatgcctccccattcaggaccccaatgaccaaataacgcactacctacccaagatccgattaatccggcaatcacgttaccaactatacctaacggaaagtcttttcctgtaatcattccagctaacgcaccaataagtccacctacaatacacgtaataataagtcccacaattaaacctcctatattcgttttatattgaattcatcaagctttagtatgtaactaaagcttgatgaacatatattattctttattatccaattcatcacttatcttttgtttcacttttccgactttttcttttatcgttcccttcgttttttcccacttaccttcatttttcaactctctatcttctgtaacttcaccaattccttcttttacttgtccttttttcttttcaactttacctttaacttgttcttttagtccgttctcactcatatttacaatctccttttcgtaatagatttatagatttaaaggatacaaatttaaatagaatacatgcatcttctttcttgtaaccattcaccgactctttctaaatccttaacgaataacaagattttcccttcatccagtttttcttcataaaagttcgcttcttcctcattaagccctaactcttgcattttatttcttaactgatctcctgttttttgaaagacgttaataatgcttgtcccaagtccctcctcttttatcccaattgtattcacgtctgcattgtccgcaattctatctgtcctatctttctcatgcgttaatacgtaaatatctttttggtctattccttttttcacgagatcattcgccgcattcatgacctctttctccgtaataaattcatatacaaaaggtttactatacttcgtttccatctttaacttcctcctttaaaatgaattatttgttatattatatgtagtacacccattttcgaaatgttaaacataaaatatgaaaaaagttatgtgaattttaattttaatagagaatgaacatcatcatttaccactttaaaacatcttctccttacaataaccacctaaattaacagaaaattgttataattaagcttgaggagggatactatgaaaaaaatcatatctatatgcgctctaaccgctttatctttcactttaataggttgtacaagtacctcggctacagataaagcttcacaagttaagcaagaacataaacaaaatacctttcaattaaattctgctaatattacagacattgaaatactgaaaacaacaaatcatactacttccaaatctcaaacagacaacgaaaaaatgatacaatctatcgtttcagcagtccaaaaaggcactcctaaacaaatcacactagatcaaaaaaagagagaatctgcacattctactattactgttacatataaagatgactcaaaagaagaatttcttgtgtgggctgataataaggagcaaattacgattgctaaagatgagaagaaagataaggtagaaggtgtgatagtgaatattaaagatgctaaaataatgaaggatttcttttaaaattctaattaacgttaaaaaaagtaggattacatcctactctttttttaatcatgctcaataaatagacctttataaaatctatttaaggtctaatttttctaaatcatgttgtaaaacattgtttccttcttgtgggttaaatacgattgcactaagaccaaaaacattcgtaacaacatctctatctttcggacgaatgattcttacttcataagcaaaaagtgctggaggaagagctgctgaacgaaaagtaacatatcgattaggtggcaatgtttgtgttgaagggtctattaatggtaacaataccggagaaccagatgaccaatcaaacatttcaactgttactctacgagtatcatctggatcaacattcatagcttcaacagtaagaaataacgtagcggaatgtctacgtaatacacccgttgacaaagtttcattgtgatgtttatgacatcttccaggaggatgaccatagccatagctcatatcaattcccccctttcatttacaattaaggacaagtattccttataatatataatgctagtattattttaatgaaaggtataaaagcggatttctatctattcgctcttaaagaataatatggattctcctgtttttcctttgaactcctgctaagaataaatctattttgaaaaggacctgctccatttattcgtaaaaagcataaagtaaatggaatccgttaaaacacatgagtgaacctttgtttttctcctcctatttaaaggaggaactgttatgggctttggtggtagttgtggcggctgtggcttcgctggaggatttgctttattagttgtattgtttattttattaatcatcgttggagctgcttgcttctgctaaaaactatcgaaaggacactcacgtgagtgtcctttcttcatgaaaaaagctctacgcaatgtgcagaggttcaagtgtaacgaatactttaaaaatgtagtattacattccccctccaaaatgaacttcgatgctataaatttcgtttaagtgcaatcttaatattttagtttaatagcaatatggtgaaactttattccaaacaatattgctattgcaccaaagtaaaacaaactggacaacctagatttcaaaaggaagacaccttaaaggttgtcttttctttataagtaaaaaaagcccgcctatttccgtaggcgggctttatctttattacacaatatgaaagtatactctctttttctttgaaattttatgtaattatacatattcatgaaaatagaagaagtgaaattgtacgtttagatacagtttggcaacaaactaactgttttcttgtgcattaatagacaactactgcaagagttatagtttttatgttttcatttcctttttgcatttctcttttaattagacgaatgctttttttagtacataataaaaaatatccagaaaaactgtcacaaaatccgtttttctggtttctctataatacaggtatcaaattgaaagtgaggtttaaacgaacatgttaaccatagaaaatgaagaaagtcatgcttctgatatgacctttgaagatttatttaagcagtactatgcttacgctgtgaaacaaatcatctggattgttaaagatcaatctatcgctgaagagttagcacaagaagtatttttacaattatatcgtagtgattggaaagagattgaaaacatacctggatggttgattaaatcttctacttatgtagcctataaccattttcgatctgaaaaaaggcagcaagcgaagattgataaagaaatacaataccatgaagtacaaaatgtttcatcattagacgatgattggataagaaaagaagaaattacaaaggtccaaacgatactaaataaaatgaatgatcgagaacgaacccttttactaatgaaattctctggttttcaatataaagaaattgcagaagtacttcaaattgaaatatcttctattggaacattattggtccgagccaaaatgaaatttcgcaagatttataaacaaatggaggaggcataacagatgaaatgttatgatatcgggtttattcaaacatatattgatggagaactttctcatgatataagaaaggaattcacaaaacacctagatacatgtgaagcatgccaagatttattaatagaaattagtaaattaaatcaatgggaaaacgtaatgctagatgaagaatctgcaaattcaccacaagaaatcaaaattgatatagaacaagcatggaaaacatttgaaagtcgttccaagttagacaatgtttctaatataaatcacaaaaaacaacaaaagaagggactctttacaaacatgagtaaaaaatcaaaacgttttatttatacagcagtagctgcagcagcacttttcacaacagcaatgattccacaagtacaagtggcggctacaaatgttgcttcctatttttctaatgcaattacaaatgataaagttgtaaatgaaggaataaaagatgaaaatggtatcacacaagatatgatgaagaatggtaaatatattcctattgatgaaaaaattacagatcaaggtattactgtacatctcaaagaagtatttatcgcagattcacgtatatcagttcattatagaatggaaaaagcggacggaagtttagtaccatttgaatttgatacatcaggattaaatcttgagagtgatggtaaaattgatgggcaacaagaggaaaaccctgagattaaaaatgacgggagactatcatttatccatgattcagatgattatcttccttttgaacttatggcagcaggtaaaaagttagataaaataggcattcgtgataatgatagacctgaaggtgttgctacatttgttataactactgaagaaaaagacgtttttaaacagcctcttactttagacgtaaatataactagaattggaaaagtaattggttcttggaaagctcaaattccaattgatacttcacatttgaaaaataatacgaattaacatgaaaaaaagaatagaacaatatgtatctaattctcagtttatatgtttccttgttttcgttacatttatttcgtatatagtttttactctatattttatttatgatttaagtttataaccttaaatcaatcatttaagaccattataagaaaaagccctctaaaaaagtgggggaataaataaccggtttcttaacgtataaggaatcggttattttgtatttaaaatgcgtctaaacgtacaattttctttttttgatatggtgacctccaatacatcattgtccttctctaagctcatatctattttaagaagagtcatttacaaattcaaaaaaaccctcaaagcatctactttaaggggatttctcctatcatcttctctcttcatacaatcgatttgctttatacgagcaaacgaaaaacatacatgtcgcaacggggataaatgtcaaaaaaagtcctctcattaatgcaaatggcgtttcaaataagaatgaccatagaaatgatacaccttgcttatcccataatcctggcgtcaagtatagttctttcggatttacaaaggctcctaaattcattgtattactatacataaataaaaataatatcggcaaataacagatcgctaattctaaaaatgttttagatagacgcttatacttccctgctcgtgacattggatctgaaaaaatgtcatcttcactttcttcatctacctttttaaaatattgcgtacctgaccaccgattaccagctatatgctcccaaccactatcttcaaataatgtgcagtaattaataaaatcactttttctactaaatactctatggtctattttaatcgtcgcatcttccggttctgtatatctaaatgtataaccaaatgtattgctttctagttgatagcctttccaagccatctcttctaaccatttttcctctttctcaaagtctaaaaagaattttaatctccacatcatcgtttcctcctaactatacgtgtaataaactttttgtaaccgcaataatgtgctgcattctcataaaatctaaatgcaatacttctttcccgcgttccgtaatgacatacacttttcttcttttatcttcactttttaccgattctattaacccttgttttaataaattttccaccgcaccatacaatgtacccgctgcgattttcacttgatgattactcagttcctccaccttttgcataattaaatatccatgagctggctctaataaagctaaaagaacgtaatacgttgtttccgttaatggtaaatttttatctctattcataaagacctccaatgtaacgataactatatagctaaactatatagttaaactgtatagtttaattttatacagtcagactgtatatgtcaaatgtaggaataactttataacccaaaacaaaaacgctacctttttaaaagatagcgtttttgttttacccttgcttattcttcgccttcatttgctcttcaagagattttttttcagtttctaacacactcatatcacttttcaacttttgcgtttcttcaaaatgttcatctactaatttattatattctttctcagagtacattttttcactggttgatgtcgttttttctttcgtaacaactacattaataattacaaataaggctacaattcctattaacgcaacgaaaatcttctttttattcatgattaatcctccaaaatgtaaaatttcaaaaattatcataacagaccaattcgctttcacctgtcacattttgtcgaatcaatataataaaaaaaagcatctgaaacagatgctttttctcattcttaatacgtaaacgtaatcgtcactaaagaatacccttctttcgcattgtaaggctccgctttataagaaacacggttgaacccttgcggataaccgatttccccaattgcatttttcacatcttgcagcgcaccgttcattgattgcttataaagtacttctatcttttctggctttgcactataacgctgctgcattttattttttaattcagtatagttatttgcaatatattcatttcctaaatagtttaactttgtatcttttaatatttgctgatatgcagacgttttcgtactacctgccgcaattttatttgtcagtgtactataataatttgttgtagcttgcggatagtctccacggttccactcatgatttcttgcgatttgttcatctgataaattgaaatacgaatacgttacgcggccctgctcatctggcaccggatcatcgaatgttgtatcaaggtgataccaattgttttcgattttcactaaattccaagcatgaggttgtccgtccccagttcctgtcacgaaatgattttcaattcctgcttcttttaataattgataagttaatagtgcgtaaccttggcaaaccgcagaacgatttacaagtgcttcatatgctgtgtaagctttataagacgtatcataagaaacatgctttactacgtaatcatgaatcgccttcactttttcgtgatcatccattccaacttgagtgatagaagaaacgattgctttcgcttgtttcatgacatattccgtctgttctttcgtttcacgatatgtaatcttaagcgtaaacgtataatttccaggtgatccagaaagtccatatgaaacattcgatctattattatttgtatactcattcttacttgccacttctttatatgcgttaaaaagtgtattcatcacttcgtctgtattattatttttcgttttatatggcagtgtaatatttgtctcgtatgtattaatacgcttttgtacttcctctttaaacgctgttaataatgccgcatctcctgtatctttcacatcagcatttttatacttcaaagttttatataaaaactgcgcatactgttcacgtgttactgtgccatacggttcaaaattcccgttccctgtgccatctgcgattccatttgactgcaccgcactaattgcattttctgcccaaaatggatttggaacatccttaaaggtatgtttttgttttgccgcaagatggaaagcattcgtaagaatttgtgccatttctgcacgattcacagaagctttcggtctaaattggccattttcatcacctttaaaaactcctaaatttgttaaagttaatacctcttctgggaacattgtagaactttgattaatatcaccgtaaggatttttaaacgtagacccatcctttaatacgtaacgagttccatcattactaaacgagccgccttgtttatttggtactaacactcgataaattaaagccgcaacttgctcccttgtcgcaacatctccaaaaccaaatatcccatttccataaccggaaataatatttttactcgctaaatctttaatcgcaggatatgaccaatgtgatgtcggcacatcagaaaaaacacccacttcagcagcttttacatcgctgccatttgtatataacaacgcaccaccaataagtgataatgatgtaattgattttaatagttttgtatacataatgtcttctcccaatacgctctctatttttgttggtttatgtcgaaaaatctaaaaatatgacaaaatatattatacaattaaaactttttaagggatatattaaattttaaaatatgcaaaaattcatattgttataaggattcatagtgatattatgttattttacttgcgaatatataaataaaaaaacgctcatctgagcgtttcatctatatacctaataattacttttttctacacttcgaactcttcttcggtaataatcctttgatctaacaactctttatactccaatatttctttagccccacgactctccatgcgtatattgtataacactttttgtattgacctttgattggtccgttgaaagatttactccatttagaaataattctattgaatttttcaccactagccacaaaaacatcttataatctttatataataaactacagtattaggagtagataaaatgccagttacactcgaacttattcttttcattcttatagcaattagtgctgttggctatttaataaaagaatttcaaaaaactaggaaacgaacacttggaatttcactagaatttttagttcttttctggtcaatatggagaatatcaactctcataatctaatttataaaacatgaattccttcgaatgaagtgaaactctaatcagtgggggttttacgggataaatttaccagtattttcaccacaacattcatgttaaaatcccttgtgagtacgacataactcgaccttatgaagctccgcagcttttatcgcggagctttttttatttaaattaacgcttttgttcacttttttgatacatttacgaaacattcatatgttacgttatataagtccttttttaaatcatattcattctagtaaaaagtcctagtccccctaggactttttgcattcaaataatgagttgtcttttttctcaataaccgaaactatttaacatggtaaaataataattggactggcatccaataccatattacaatggagcaaatcgcaagaaggcaccttagagtgtcttttttgtacataaaaaaatcttaccatcttatagaaacgataagccctttaaaacaataattgcaactatattaactttacattacattaaggttagagaatgttcttatattaataaagtgctaaatagtaggtgaaaaaatggaatttaacgatttgggtattaccattaaagaacttagaattaaaaaaaatatatcacaatccgacttatgtcacggaatatgttcacaaagtcaaattagtaagatcgaaaaaggtatgatttatccatctagcatattgttatatcaattatcagaaagactcggtgttgatccaaatagtatatttgcactaactcaaaacaagaaattaaaatatacagaaaacgtaaaatacgtaatgagggattgcataaggcaacatcaatataaagagctttatgaaatagtaacaagagaaaaatacacaaataattttcaaacaaaagaagataaacaatttctaatatggcatgaagcaattgctatatattgtgtgaataactcaacaaaagtggctttaactcttttaaataatgcactaaaactaactgtaaccaatattgattttttatcagagagagaaatagatattctacatacaatggctatacttcatgcagaaaataaagaatacaaaaaaagtattactatccttaaaagatgtttaaataattttaacaaattagattttcctagagataaagaaattaaattgaaaatcatttataatttagcaaaaaatttaagttacacatatcaatacgaagaagcaataaaatacattgataagggtatccaattagctattaatctaaatactttttacttattgggtgaactatactatggaaaaggttcaaatttattaaagcttaaacaatataatgaagaagatgttgctaataacatgagaaaatcattatttatatttgaattaacaaaaaacgaaaaaaaattacaaataattaaagaagaatatttcgaaaacaaaaataaccactcataatttcttaaaaactacttataaaactcacaggaaaaatcccaatagtttttaaacttagaaccatattattgttttaattcagaggaaggcaccttagggtgtctttttttattttcaaaaggacctgctcaattaattcttaaaaacatactaagaaacattgttttatttatcccattttcattcatgctatataaaattcgttaataaatccacctcaaacatatttatatgcattggagtatgtttgaggtggaactccttcaaatactagttccttttataagccgtttttttgatgtagatgacattattctcaatacaatagaatgaattatgggaacatacttagcaatatatatcaaaaaacaatattaagaaaacccctccaccttaaggtagaagggatcttctaatttctatttcaaactacctaaaatttccgtaaagataacccaaagcgtatgtgcacctgcatctggatatcctaaacttttttcaccaactaccgctcctctgccgaatgatctttcaccgatagattgtatgccgtgaagtgctacttgtaacatttcaattcagatatacgacaggaaagaatacatcatcacagtgtcagcaagcaaaagtgtattctgcatttctgaaaacagtagatggcagattgtgacctactgaatctgctaagaaagaatatacaagaacatccttaacatcctctttatttccactaatgatgacatcaaggaaatcttctacttgaaattctggagtaaacaacacaatcttagttgttctgtttggttctaaagaaacaaaagtacgagagatttcaactaattcattttgagttgggaaaaaggtgtttcgacttctcttaacagttaccgttacattactagtatggcagcgtgaatcattgtttaacataatgttgagagcagttggaataatcccattttcagaaactggaactcgaaacactccagtagatttatgagccatataatcagatccttccaaaataaaatatatttacaatatattagatgcaaaaaacgttcattttgatatggacaaattatatgattaatatatctataataaccctcggtattactaagccaatgttttaaaagattaacaaataattacctctgcaaatttagaaaatatctacactttttacaaacattattacaattagataaactaaagcaatatctcattaacaaagggactccataattggagtccctttgttaatgagatattaaaaatgatcagcatgtgaatattgtataatttcttccttttttagagcatgttgtgtatcacctgtattgttactaaatgataatactatcactaatcctaacgtcgctaatataagcttcttcattattttaacgcccctttgcttagtagtttttgtttcgcttcgtaacatacatcgaaataatcactaactttttcatgcttattcaatttgctgcgacaacatcatttgataaaaatcattaagttgttgcataactgcttcatacattaaaatatttgtgctcatatcactacgtcctcctcaactacttctatttacctaaaaattatcataattctgtaaattatataatagttcaacctctaattgtaaatcgataaaaaacaacagaatattccgaatcaagagaagggattggctaacaaatggttactgtataaaaataaaaaacttgtgatattgcttttatcatatttgctcttatatatggttctgttacaaagtttgctaagttaatataaactctagaaaaaatgaataaagatcaccacagctgagctatctttaatccgtataataatataaacattctattaattcatattattaataaggaaatacttaaatattcgatttttttctaaaagtgtattatactgtaaattgctgagggatacattttagtattttctggtaaatattcagtttgttaggttgttattagtattatggtaacgaaaaacttatattttcccttgaagataaagcattagcagcaattacatccagatatcataataataattattttcttaacaatatcacggaattttaattcagaaaattcgaacccttaagtaatataaagtgctaaataaaatatttagacaattgaagtccaacaacgattagaagatatatatattagaaaaggaattttgggagagcttatcctatataactaatacatatagcgttgtatctttaaatcaataaatttttcgataagctagttaatagattattgaatttaatcttttaatagagttaaaaaaatcaactttacattctaatttagaaattattaggtggtgtcggtagtgtttgagtatcttttagttaaagctttatttactattttcttaattagcctaatcgtgttaatcagtttaatatggactaaaatagaaaaaattctggacgagactgtatttaaaaacgtttctgaaaaatccagatatgtagtaactatggtaattgttatggtaggagaatttgttctcatagtcattacttcattaaattggagagcttcaattattgacacactcttttttggtagtattattttattctgctgtatatggctaataccttattttgttaatcaacaacaaaacgtcgctaaagttatggataagcattttagtggaggggtagatttaggtgaaattcaagttcatcgtgcgaaactttctgcatttaatttaggaagtattgtattttctatagtgggaattattatacctatttgttattattttaaatactttttataacggtttattggttctgttggaaattttttaaagatatagtaataggtgagattacagatatttatgtagaaacaacttagatgtataagacaatccatgtgagcgaaaacagtaaaataccctataaggtctcttttacttgtattaattaaaaaatgatactaattataaatgctaacttaaatatgtacattaacgcttgaataaatatgtacattttcgtgtggagtgggggaaaaggtagagataacttcaaatccttacctatcactaacaagagcgtcgaggtgtatttgaagaagcggcaggcgtactaaaatacaaacttcgcaaaaagaaagctgaagggaaactagcagaaacacaagaaaacttaaatcgtgtacaagatataattcatgaattaagtagtcaagtagaacctttagaaagacaagcttctattgcgaaagattatcttgagaataaagaagaattagagaaagtagaagctgcgcttattgttcatgaaattgaagaattgcatgagaaatgggaagcgcttcgaaatcagtttgggcataataaaaacgaagaagctaaaatgtcaacgaatttacaaaaaagtgaagaagagcttgaggaattacgaggacaattacaagcggtagacgagtctgtagactcgttgcaagaagtacttcttctttctagtaaagagctagaaaaactagaagggcagcgtgagttgttaaaagaaagaaagcaaaatgctacgacgcattgtgcgcaacttgagcagttaattgttgaattaactgagaaagctaaaagttacgatggtgagattgagtcaagtacagaatctttaatgcaatttgtgaatgaagtaaaagagttggagcaaaaattgcatgataatgagcaactgcttgctacttttgctgacaatttagaggaacagattgagaatttaaaaggtgactatattgagcttttaaatcaacaagctagtcatcgtaatgaattatctatgattgaagaacaatcgaaacagcaaacgtctaaaaacgagcgtctagatgaagagaatgcgaaatatgtagaaatgcgtatggaaattacagcgaaaaagacgaaacttgtagaaagttacgaacaagcgaaagaaaaagtagctggcattctctcaaatatacagaagacagaggcggcgcttgggaaatgtaagacgcagtatagtgaaaatgaaacaaaactgtatcaagcatatcaatttgtgcaacaggcacgttctcgaaaagaaatgcttgaagagatgcaagaagattattctggattctatcaaggtgtacgtgaagtattgaaagctagagaaaataggttgcaaggtatcgagggtgctgttgcggaactgttaacggtaccgaaagaatacgaagttgcaatggaaatcgctctaggtgcagcgatgcagcatattgttgtacaaacagaggaacatgctcgtaatgcgattgcatttctaaagcaaaataaacatggacgtgcaacgtttttaccgcaagctgttattaaaagcagatcgttatcatttgagcaattacgcattgcaaatcaacacccatcgtttgtaggtgtggcggcagaacttgtgcagtacaacaataaatatgaaaatgtagtttcaaatttattaggtactgttattgttgcgaaagatttacgtggagcaaatgagttggcgaaacaactgcaataccgttatcgcattgtaacaatcgaaggcgacgtagtgaatcctggcggttctatgactggtggggcggtaaagcaagcgaaatcttctttattaggacgccaacgtgaactggaagagtggactcgcaagttaactgatatggaagaaaaaacaacgaagttagaaaactttgttaaagcagtaaaacaagagattcaagaaaaagaagtgaaaatacgcgaactaaggcaaactgtagaagcagatcgtgtagatgagcagaaattaagagaagagattaatcgtttagaattagaagaacatcgtattaatgatcggttgtctatttatgatttagagattgaagggtttttacaagatcgagtaaaaatgcaagggcgtaaagaggagttagaaggggttttaacgaatcttcaagctgaaatcactaagttagatagtaaaattgtagctttaacaaaacaaaaaagtgagcaacattcttcgaaagaaaaagttcaaaaagaaatgactgagttaaaagtgctggcagctgaaaagcaacaacgcttatctaatcaaaaagaaaaagttgaacgattgacgaaggaaaaagaagaaacggatgcgacacttgtaaaaacgaaagaggatttagcgttcttaaaacaagaaatgacatctaattcaagtggtgaagagcaaattacgaatatgattgagaagaaagcatatgatcgtaatcaaacttcagaattaattcgctctcgtcgtgaacaacgtgtatcgttgcaagagagagtagaacatttagagcgcaatttgaaagaaacgacaggtaaacataaatatgttcttgaaatgttgaaagatcaagaagtgagaataaatcgactggatgtagagttggaaaatagattacaacatttacgtgaaacatatacgatttcatttgaagcggcaaaactaaaatatacaatgacaatgcctgcagaagatgcgcgtaagaaagtaaaattaatcaaattatccatagaagagttaggtacagtgaacctaggggcaattgatgaatatgaacgtgtagcggagcgtcatacattcttactagagcagagagacgacttagaagaagcgaaagcgacattgcaccagcttattaccgaaatggatgaagaaatgaaaaaacgcttttctactacgtttgaaggcattagaatggagtttcaatcggtattctctgaattatttggaggcggtagagcggatttagtaatgactaatccagaggatttactaaatacgggtattgatattgtagcacaaccgccagggaagaaactgcagaacttaggtttactttcaggtggagagcgtgctttaacagcaattgcgcttttatttggtattttaaaagtacgcccagtaccgttctgtgtactagatgaggtagaggcagcccttgatgaggcgaatgtagctcgttttgcacagtatttaaagaaattcagtgatgagacgcagtttattgtaattacacatagaaaaggtacaatggaagagtctgatgtgttgtacggtgtaacaatgcaagaatcgggggtatctaaacttgtttcggttcgtttagacgccggagaagaacttattgcaagtgaataggaaggatgggaaagtatgagtttttttaaaaaactaaaagaaaaaatttcaaaacaaacggatacagttacagagaaatttaaacaaggattagaaaaaacgagaaattcatttgcggataaagtgaatgatttagtgtatcgttaccgtaaagtggacgaagatttcttcgaagagttagaagaaattttaatcggtgcagacgttggcgttgcgacggtaatggaattaattgaccaattgaaagaagaagtacaacgtcgtaacattcaagatccaaaagaagtacaagctgttatttcagaaaaactagtaggaatttacaaaggtgacagcgattttagtaacgaaattaatatgcaagaggaccaattaacggtcgttttatttgttggtgttaatggtgtaggaaaaacgacgacaattggtaaactggcgcataagtttaaatcagaaggtaagtcagtcctattggcggcaggagacacattccgtgctggagcgattgaacaattagaagtatggggcgatcgcgttggtgtagaagtgattaaacaaggatctggatctgatccagcggcggttatgtatgacgctgtacaagcagcgaaagcacgtaaggtagatgtattactatgtgacacagcaggacgcttgcaaaataaagtgaacttaatgaaagagttagagaaggtgaagcgtgtaattgagcgtgaagtaccaggtgctcctcatgaagtattgcttgttattgatgcaacaacaggacaaaacggtttaagccaagcgaaaacattccgtgaagcaacgaatgtaactggtattgttttaacgaagttagatggaactgctaaaggtggtattgtattagcgattcgtaacgaaatggatgtaccggtgaagtttgttggattaggagagcaaatggatgacttgcagcagtttgatccagaacaatatgtgtatggtttatttgcgaacttagtagaaacagaagaagtataagcgaaagaagcggtatttccgcttctttttctataaaaaatatatgatgttaagaaaaaaacttgacactcttttggactacatgtaaactaattcatgtaaagggaaatcacttaacaaaggatgatccaacatgctcgaaaaaacaacgagaatgaactatttatttgatttttatcaatcgttgttaacgcaaaaacaaagaagttatatgtcgctttattatctagatgatttatctcttggtgaaattgcggaagaatttgatgtaagtcgccaagccgtgtatgataacattaaacggactgaagcgatgcttgaagaatatgaagaaaaattagtattacttcaaaagtttcaagagcgacagcgacttgttgcaaagctaaaacagctaatcagcgaagaagagcatgtgaatgaagaaatgaaacaagttgttgaagctatcgaaaaattagattaggagggcggcaatatggcatttgaaggattagccgaccgacttcaacagacaatgcaaaaaatccgcggcaaaggaaaagtttctgaagccgatgtgaaagaaatgatgagagaagttcgtctagctcttttagaagcggatgttaactttaaagtagtaaaagattttgtgaagcgtgtgtctgaacgtgctgtcggacaagatgtaatgaaaagtttgacacctggacaacaagtaattaaagttgtacaggaagaacttacagaacttatgggcggagagcaaagcaaaattgctgttgctaataagccaccgactgttattatgatggttggtctgcaaggtgcgggtaaaacaacgacgacaggtaagcttgcgaatttgcttcgtaaaaagcataatcgtaaaccgatgcttgttgcagcggatatttaccgtccagcagcgattaaacagcttgaaacattagggaagcaattggacatgcctgtattttctttaggagatcaagtaagtcctgttgaaattgcgaaacaagcgattgcaaaagcaaaagaagatcatcacgattatgttttaatcgatacagcgggtcgcctgcatattgatgaagaattaatggatgaattagcgaaagtgaaagaagttgcgaaaccggatgaaattttccttgttgtcgatgcgatgacggggcaagacgcggtaaatgttgcacaaagtttccatgaacagttaggtttaacaggtgttgtattaacgaaattagatggtgatacgcgcggtggtgctgcattatctattaaggctgtaacaaacacgccgattaaatttgctggtatgggtgaaaaactagatgcaattgaagcgttccatccagagcgtatggcatcccgtattttagggatgggcgatgtcttaacgttaattgaaaaagcgcaagctacagttgatgaagagaaagcaaaagaacttgagcaaaaaatgcgtacgctttcgtttacgcttgacgatttcctagaacaacttggacaagtgcgccaacttgggccgcttgatgaattgttaggaatgcttcctggtgcaaataaaattaaagggctgaaaaatgcgcaagttgatgaaaaacaaattgggcatattgaggcaattattcgttctatgactaaattagaacgagaacaaccggaaataatcaatgctagtcgcaaaaagcgcattgccaaaggtagcggtacaactgtacaagaaatcaatcgtctaattaagcaattcgatgacatgaaaaaaatgatgaagacgatgacgggaatgcaaaaaggtaagaaaaaaggactaggtggattgaagtttccattcatgtaaggaaaaaaagatggctctgttaagaaaaaatactttacaaagcaatagtctttttgctaatataattatctgtgtgaaataaattcggaggtgctttataaatggcagttaaaattcgtttaaaacgtatgggagctaaaaaaactcctttctatcgtgtagttgttgcagattctcgttctcctcgtgacggacgtttcattgaggaaatcggaacttacaatccagttgctcaaccagctgaagttaagatcaacgaagaagcagcattaaaatggttaggaaatggtgctaaaccatctgatacagttcgtaacttattctctaaccaaggtatcatggagaaattccacttatctaaacaaggtaagtaattgaggcaatgactatgaagaagttagtcgagacgattgtcaagcctcttgtcgattatcctgaagatgtaaaagttacacaggaactttgcaacggagagataaagtatcgattaactgtacatcctgaggatgttggaaaagtcattggaaagcaagggagagttgcgaaagcgattcgaatgctcttgtattcagtgggacatcataatgatgaaaaagtaacactggaaattcaataaacgtaaaaagggcgaggagttattcctctcccttttttaacatttaaatagagattgcatgttccatctgcgaaatggagatgcttaatttatatagaaaccaggggtgacatactatttatgacaaaatggtttaacgtagggaaaattgtaaatactcatggcgtaagaggagaaatccgtgttatttctcgtactgattttccagaagagcgatataaagtaggaaacacgctatacatatcgaatgagaaaggcacagactatcttccggtgaaggtaacttctcatcgccaacataagacattcgatttattaacatttgaaggatataacaatgtagatgaagtagagaagtttaaaggttctttaataaaagtaccagaagagcagttaggcgaacttgctgaaggtgaatactactatcatgaaattattggttgcagtgttgtaacggaagaaggagaagcgctagggacaatcaaagagattctatctcctggtgcaaatgatgtttgggtaattaaacgcccgaagggtcaagatctcttaattccttatatcgatgatgttgtacttcaagttaatattgaaaataaattagtaaccattcatgtaatggaagggctgctataatgaaaattgatattttaacgttgttcccagacatgtttaccggtgtatttggatcttctatattaaagaaggcgcaagaaaaagaagcggtaaaccttcgtgttgttaactttcgtgattatacaacaagtaagcataatagcgtagacgattatccttacggcggaggagctggtatggtgcttactcctcagcctatttttgatgctgtagaggatttgacgaaagagacagagcgtaagccgagagttgtcttaatgtgtccgcagggcgaaagatttacgcagaagaaagcggaagagcttgcaggggaagaacatttaatcttcgtatgtgggcattatgaaggatatgacgaacgaattcgtgagcatctcgtaacggatgagatttctattggtgactatgtattaacgggcggagaattagcctctatggttattactgatagtgtggtacgtctcttgccaggtgtgctaggaaatcatgcttcacaagtagaggattcgtttagtacaggtttattagagcatcctcattatacacgtccagctgattttcgtggtatgaaggtaccggatgtattaatgtcagggaatcataaaaacattgatgaatggcgacataaggaatctttgcgccgaacgtatacgcgtagacctgatttattagatgagagagagctatctaaacaagagaaaaaatggcttgaggaaataaagcgagagcagtaataacttcatatatttgctattgcaacaggcctagtaatatgctattataacatttgtgctactgaaatcagtagccgtattaacgatgttccgctgtaatttattaagactttataagagcatctgtttaaaggagagaatttaatatgcaacaattaatcgcagaaattacaaaaggccaattaaaaactgaccttccttcattccgtcctggtgacactttacgtgtacacgtaaaagttgttgagggaactcgtgaaagaattcagcttttcgaaggtgttgtaattaaacgtcgtggtggcggaatcagtgaaacattcacagttcgtaagatttcttacggtgtaggtgttgagcgtacattcccagttcacacgccaagaatcgcgaaaatcgaagtacttcgccgtggtaaagtacgtcgtgctaagttatactacttacgtaaccttcgcggtaaaaaagcacgtattaaagaaattcgataagacatgtatgggagcttgtaaatgcacaagctccctttttccaatctatatgaaattttggtataatacgagcagtttacataaccgtggaggggaaatgcatgaaaaaagagaagagttcactttgggaatggattaaagcaattttgattgctgttgtattagctggtgttattagacagtttttctttgcgccaattctcgtagacggggtatcgatggcacctactttacatgatcgtgatcgaatgattgtgaataaaattggttatcacattggagatccaaaacgctttgatattatcgtatttcgagcaacagaagataaagattacattaagcgcattataggcctgccaggcgatgaaatagagtatcgtaatgataaactgtatattaacggaaaggcttatgaggagccgtatttagacaagcagaaaaagcaaattgctgacggaccgcttacatatgattttaatcttgaagaaatgacaggcaagaaaaccgttccaaaagatcaattatttgttttaggtgataatcgtcgttttagtaaagatagccgttcaatcggtacgatttcaatggatcaagtaattggtaaagctaatatgttatattggccgttagaagacgcacgtattgtgaaataaatgaaaaagaaggtggcaacatggtaattcaatggtttccagggcatatggcgaaggctagacgccaagtaacggagaaattaaaattaattgatgttgtaattgaacttgtagatgctcgattaccattatcatctcgaaacccaatgattgatgaaatcattacacataagccaaggcttgttgttttaaataaagcggatatggcagatgatcgtttaacaaaacaatggatcgcatattttaaagaaaaaggccatatggcaatttcaattaacgcgcaagctggacaaggtatgaaggaaattgcagcagcttgtaaagtgcttgttaaagaaaaatttgataaaatggttgcaaaaggtattagaccgagagcgattcgtgcattaattgtaggtataccaaatgttggtaaatctacattgattaataaattggcaaagaaaaatattgctaaaacaggagatcgtccaggtgtgacaacagctcaacaatggattaaagttgggaaggaaatggaattgttagatacaccaggtattctgtggcctaaatttgaagatcaattagtgggtcttcgcttagcgacaacgggtgcaattaaagattcaattttaaatttacaagatgtagctgtttacgcattacgttttatggagaaacattatccagaacgcttgaaagaacgctataatttaaatgagattccagaagatattgtggaattattcgatgcaattggaaaaaatagaggctgcttaatgggcggcggaatgattgattatgataagacatctgagcttgtgcttcgggagcttcgtggtggcaaacttggaaaaatgacgtttgaaacaccggaagagtttgcagagcaagtagaagatgtggaaaaaatagaagaagtataagacgtgcgtttgtgcgtcttttctttttggatatgtttaaaaaggagcttgtataaatgcaaactataacgataaaagaagcagaaaatgtattgaaagaaattatgaatgaagaagatgatcgctttcaactgttaatgaaagatgatcgaaaaggtgttcaaaagctcgttttgaagtggtataaacaaaaagagttagaacagaaagaaaaagagaagttttttgagatgtccaagtatgaaaatgctttgcgtgaaaaaggggtcacatatatcgcgggtattgatgaagtagggcgtgggccattggctgggcctgttgtgacggcagctgtcgttcttcctgaggatttttatattccagggttaaatgattcgaaaaaattgagtgaagcgaaacgtgagcgtttttatgatgaaataaaagtacaagcaattgcaattggagtaggaattgtatcgccgcaagttattgatgacattaatatttaccaagcaacgaaacaagcgatgttagatgcagttgcgaatttatcttgtacaccccaacatttattaattgatgcgatgaaacttcctacaccaattccgcaaacatcaattattaaaggtgatgcgaaaagtgtttcgatttcagccgcatccattatcgcaaaagtaacgagagatcgtatgatgaaagaactgggagagaagtatcctcaatatggatttgagcaacatatgggatatggcacaaagcaacatttagaggcaattcaagtgcatggagtattagatgaacaccgaaagtcattcgcgccaattaaagatatgattcaaaaataagttgtaaatatacagcttatttttttattttggcatataaacattactatttccgaaaaagaataaagcgatttcagttttctgacactttattgtagacagcgtgccaatcatcttatacaatggcaatgtaatgttttttaaacattaaaaaacttttcgagtaaaacaggaaaacaggggaggatgggaccatgaatatccatgagtaccaaggtaaggcagtccttagaagctatggggttagcgttccgaacgggaaggttgcatttacagtagaagaagctgtagaagcggcgaaagaattaggaacagatgtatgtgtagtgaaagcacaaattcacgctggtggacgcggcaaagctggcggagtaaaagttgcaaaaaatttagatgaagttcgtacatatgcagaaagcattttaggaactacacttgtgacacatcaaacaggtcctgaaggtaaggaagtaaaacgcttacttatcgaagaaggttgcgatattaaaaaagaatattatgtaggtctagttttagatcgtgcaacttctcaagttgttttaatggcgtctgaagaaggcggaacagaaattgaagaagtagcagaaaaaacacctgaaaaaatctttaaagaatatattgatccagcagtaggcttacaaggtttccaagcgcgccgaatcgcatttaacatcaatattccaaaagagcttgtaggacaagctgtgaagtttatgatgggcttataccgtgcgtttatcgaaaaagattgctctattgctgagattaacccacttgttacaacaggtgaaggtaaagttatggcattagatgcaaaattaaactttgattctaatgcattatatcgccataaagacattttagagcttcgtgatcttgatgaagaggattcaaaagaaattgaagcttcaaaatacgacttaaactacattcctttagatggaaatatcggttgtatggttaatggtgcaggtttagcgatggctacaatggatatcattaaacattaccacggtgacccagctaacttcttagatgttggtggcggtgcaactgcagaaaaagttacagaagcattcaaaattatcctttctgacaaaaatgtaaaaggtatctttgttaacatttttggtggcattatgaagtgtgatgttattgcagaaggtgttattgaagcaacgaaacaagtaggtcttgagttacctttagttgtacgtcttgaaggtacaaacgtagaactaggtaagaaaattttaaatgagtctggcttaaatattgttgcagcagaatctatggcagacggtgcacaaaaaattgtttcactagtgggctaatagaaagcgggggagaaaaatgagcgtattagttaataaagatacaaaagttattgttcaaggtattacaggttctcaaggtttattccatacaaaacaaatgattgaatacggtacgaaaattgtcggtggtgtaacaccaggtaagggcggcactgatattgaaggtgtaccagtatttgatacagtagaagatgcagtgaaagcaacaggcgcaaacgcttcagttgtatacgttccacccgcttttgcggcagatgcaattatggaagctgttgatgcagaaattgatttagtagtatgtattactgaagggattcctgtattagatatggtaaacgtaaagagatatatggcgggtaaacatacacgtttacttggaccaaactgcccaggtgtaatcacaccggatgaatgtaagattggtattatgccaggatatattcataaaaaaggtcatgttggtatcgtatctcgctctggtacattaacgtatgaagctgtacatcagttaacacaagaaggtattggccaatctactgctgtaggtatcggcggagaccctgttaacggtacagactttattgatgctttaaaagcatttaatgaagatgaagaaacacatgctgtaattatgattggtgaaatcggcggtacagcagaagaagaggcagctgaatgggtaaaagctaatatgacaaaacctgttgtaggcttcattggtggtcaaacagcgcctgctggcaaacgtatgggccatgctggtgcaatcatttctggcggtaaaggaactgctgctgaaaagattaaaacaatggaagcttgtggcattaaagtagctgaaactccagcagttatgggagaaacgctaatctctgttttaaaagaaaaaggtttatttgagacttgtaaaaactattaatctgttgaaagacaccttcttacttgagggtgtctttttagactttttctgtttacataataaaaattatgggtaaggagaatcaagatgaaaagagagagattattacatcttcattacttgctagcagattattggaaagcgatggagaggctactatatgtcgatccagaattagagaacatatataattttaacgaaaaacaaatggaacactacactggaatatcctcgaaaaaatcttcagaactagtaaaatttcttcaaagttcaaatcttccgcaatatatatcttatttagagaaaaatcgtattttttatataacgatatgggatgaaaattatccgcaattattacgtgaaatacaagaccctcccttcgttttatatggaaaaggagagaaagatttcctgaataaagtaaataaattagcagttgttggaacgagagaaccatcattatatggtcatgagagtttgaagtttattttacaccctttattagaaagagagtggcttattgtcagtgggtttgcaaaagggatagatacaatgtctcatgagattacagtaagacatcattgcccgactattgcgatattagggcatggattgtcttttatgtatccgaaagaaaatagacctttatatgaaatgtggaaggaatatatattgttattgacagagtatccgccgcactatgcaccgaaaaaatggtattttccaaaaagaaaccggattattagtggtataagtaaaggtgttttagttgtagaagcgaaatcgagaagtggaacacttattactgcggaccttgcgttagagcaaagtagagaggtatttgcgcttcctggacctatatttatagagggggcatcgggaacgaatcatcttattcagcaaggagcaaaactagtaagaaatgcagaagatatcttggaagagattttaaattaaccttatatttttatgtttttattaaacaattattgacaaatggtagattggcactgtatggtatattcattcttgattgacaaaaacaagagaaatcaataagattaatgaagacttgaatccacctcttaaggaggcactagcatgtcagattacctcgtaatcgtggagtcgccttctaaggcgaagaccattgagaaatatttagggaaaaaatacaaagttgtcgcgtctatgggacatgttcgcgatttgccaaaaagtcaaatggggatagaagtaaagaacaacttcaccccgaagtatattaccattcgtggtaaaggtcccgtcttaaaagatttaaaatcagcggccaaaaaagcaaagaaagtctatctcgcggccgatccagaccgtgaaggggaagcgattgcttggcatttagcgaatacgttaaatgtggacgttgaatcagattgtcgggttgtgtttaatgagattacgaaagatgcgatcaaagaatcatttaaacatcctcgtgcaattaatatggatttagtggatgcacaacaagcaagacgtatacttgatcgtcttgttggttacaatattagtcctttattatggaagaaagtaaaaaaaggattaagtgcaggacgtgtacaatctgtagcagttcgtttaatcatcgagcgtgaaagggaaattcaaaactttgaacctgaagaattctggacaattaaaacagaatttgtaaaaggaaaagacacatttgaagcaagcttttacggtgtagatggtgaaaaagttcaattaacaaatgaaacgcaagtgaatgaaataattgaacagatgaaagacaatgcgttttcagttgaaaatgtaacgcgcaaagagcgaaaacgtaaccctgcattaccgtttacaacatcttccttgcaacaagaagcagcccgtaagttaaacatgcgagcaaagaaaacaatgatgcttgcacagcaattgtatgaagggatagatcttggaaaacaaggaactgtaggtcttattacgtatatgagaactgattcaacacgtatctcagaaacagctcaaacagaggctcgtacttacatcactgaagcgtatggtacggaatacataggaacagaaaagaagaaagaaacgaaaaagtcaaatgcacaagatgcgcatgaggcaattcgtcctacttcggtaatgagaaagccagaggaactaaaaagtttcttaggtcgtgatcaacttcgattatataaattgatttgggagcgatttgttgcaagtcaaatggcgtctgctataatggatactgtgacagcgagactcattaataacaatgttcagttccgtgcaagtggatcggttgtaaagttcccgggatttatgaaagtgtatgtagagtcaaaagatgatggtgctgaagaaaaggataagatgttgccgcctttagaagtaggggaaactgtattttcaaaggatttagaaccaaagcaacattttacacaacctcctccgcgctatacagaggctcgcctagtaagaacacttgaagaacttggaattggaagaccgtcgacatatgtacctacacttgaaacgattcaaaagcgtgggtatgtaggcttggataataaacgcttcgttccgactgaacttggtgaaatagtaattgaacttattttagagtttttcccagaaattattaacattgaatttactgccaatatggagcaaagccttgatgaagtagaagaaggaaatgcgaattgggtaaaaattgttgatgatttctacgtaggttttgaaccgcgtttagaaaaagcggaaaaagaaatgcgtgaagtggaaattaaagatgaaccagctggggaagattgtgaattatgtaatcacccaatggtctttaaaatgggtaaatacgggaaatttatggcttgctcgaatttcccagattgtcgtaatacaaagccgattgtgaaagaaatcggtgttacttgtccaaagtgtgataagggtcaaattattgaacgccgtagtaataaaaagaaacgtcttttctatgggtgcggtacgtatccggaatgcgactttgtatcttgggataagccaattggtcgtaagtgtccgaagtgcgaaggcatgcttgtagagaaaaagttgaaaaaaggcgtgcaagtacaatgtatttcgtgcgattatgaagaagaacaacaaatgtgagcgtaactgctcacatttttttcgggaagaaaaggaaaggtgatataaatgacaacacaagtagtaaacgtcattggcgcaggtcttgcaggaagtgaagcagcttatcaaattgcaaaacgtggtgtccaagttagattatatgaaatgagaccggtaaggcaaacgccagctcatcacacagataaattcgctgaattagtatgtagtaactcacttcgtgcaaacactttaacaaatgcagttggagttattaaagaggaaatgcgcttaatggattctgtaattattcgtgcggcggatgagtgctctgtaccagctggaggcgctttagctgtagaccgtcatgagttcgcagctaaagtaacagaatacgtaaagaaccatccaaatgtaactgtaatgaatgaagaaattacagatattccagagggaccgacaattattgctacaggtccattaacatctcctgatctttctgcaaaattgaaagaattaacaggagaagattatttctacttctatgatgctgcagccccaatcgtagaaaaagacagcattgacatgaataaagtatatttaaaatcgcgttatgacaaaggtgaagctgcatatttaaattgcccaatgacagaagaagagtttgatcgtttttatgaggctctaattgctgctgagacagtgcctttaaaagagtttgaaaaagaaattttctttgaaggttgtatgccagtagaggttatggcaagtagagggagacagacgttagtatttggacctatgaaacctgttggattggaagatccaaaaacagggaaaacgccatatgctgttgttcagttacgtcaagatgatgcagcgggaactttatacaatatcgtaggtttccaaacacatttaaagtggggaccgcaaaaagaagtgttacagttaattccaggattagaaaatgcagagattgtacgttatggtgtaatgcatcgtaatacgtttattaattcacctaatttgcttcgtccaacatatcaatataaacaacgggatgatttattcttcgctggtcaaatgactggagtagagggatatgttgaatcggcagcatcaggattattagcaggaattaatgctgcgcgtcttgtgcaaggtgaagagccagttgtattaccgccagtaactgcgatgggtagcatggcaaattacattacggcaacgaacgctaaaaacttccaaccgatgaatgcgaacttcggtctatttgcaccgttagagaagaagattaaaaagaaagcagaacgaaatgaagcgtacgcagcacgagctttagaaacgattcgaaattttgtaaatatttagttaaatttcttgcaaaggctactaagttgtgatacgatttagtagcctttattgaggtgagttgtgtgaatgtgaagaaattgttacaattattcgttggatatttacaaattgaaagaaattattcaaaatatacaattgcaagttatcaaaatgatttagaacattttgtgcaatttatggaacgagaaggcatatcctcttttttagacgttacatacgcggatgttcgtttgtacttaacgacgttgcacgatgagaagttagcccgtaaatctgtcgcaagaaaagtatcaagcttacgaagtttatatcgttttttgatgcgtgaaggttatcgaaaggataatccgtttgcacttgcgtcactccccaaaaaagaattgtcaatcccaaagtttttatatgctgaagagttagaggaattatttgaagtttctgacacagaaacaccattaggtcaaaggaatcaagctttgttagagttgatgtatgcgactgggatccgtgtgagtgaatgtgtcaatttacaacttaccgatattgactttgcggtgggaacaattttagtaatgggaaaaggaaaaaaacaaaggtatattccgttcggaagctatgcgcaagattctttaattacttatatagagaatgggagaaaacagttagttaataagactgacgaagactctcatatggtatttttaaatgcgaaaggtaaaccgctaacaagtcgtggagttcgttatgttttaaatgaactcattaaaaaggcttcgctgacaatgcggataagtccccatatgttaaggcatacatttgctacacatatgctagatgaaggggcggatttacgtactgtacaggagttattaggccatgaaaatttgtcgacgacacaaatttatacgcatgtctctaaagaaagattgcgttctgtttacatgaagcatcacccgcgggcataaattgctttaaaagctataaaaacaaataaaggagttttttctatgggaaatttccacgctacaacgatatttgcagttcatcataatggagaatgtgcaatggctggagatggccaagtgacaatgggaaatgctgttgtaatgaaacatacagctcgtaaagttcgtaaacttttccaaggtaaagttttggctggtttcgcaggatcagttgctgacgcatttactctttttgaaatgtttgaagggaaattagaagagtataatggcaacttgcagcgtgctgctgttgaaatggccaaacaatggcgtggcgataaaatgttacgtcagctagaagcaatgctcattgtcatggataaaacaactatgctccttgtttcaggtacaggagaagtaattgaaccggatgatggtattttagcaattggatctggtgggaattatgcactttctgcaggtcgtgctttaaagcaatatgcaagtgaacacttaacagcgaagcaaattgcgaaagcgagtttagagattgctggcgatatttgtgtttatacgaatcacaacataattgttgaagaattgtagaatcgtaagggaggcattttatatgcatttacattttactccgcgccaaattgtggaaaaattagatcaatacatcatcggtcaaaaagacgcaaagaaagcggttgctgtagcgttgagaaatcgatatcgtcgcagtaaattagctgaaaatttacgtgacgaaattgcacctaaaaatatcttaatgattggaccgacaggtgttgggaaaacagaggtagcacgacgaatggcgaaactcgttggagcaccttttattaaggttgaggctacaaaattcacagaagttggatatgtgggtagagatgtagagtcgatggtacgtgacctagtggaaacatcggttcgtatcgtaaaagaagaaatggtagtgaaagttcaagataaagccgaagagcaagcgaatcaacgtcttgttgaaattttagtgccgagtccagagaaacaatctggattcaaaaatccattagagatgctttttggaggcactcaaaattcgaatcaaacgtctgatacacaagaagatgttgaaatcgaaaagaagcgtcaagatgtggagagaaagcttgctgcagggcttcttgaagacgaaattgtatcgattgaagtgactgaacaacagtcttccatgtttgatatgttacaaggaactggcatggagcaaatgggaatgaatttccaagatgcgctaggaagttttatgccgaaaaaaacgaaaaaacgtaaactttctgtaaaagaagcaagaaaactcttgacaaatgaagaggcacagcgcttaattgatatggatgaagttacacaagaggctgtttatcgtgctgaacagctcgggattatttttatcgatgaaattgacaaaattgctggtaagcagtcgaatagcgtagatgtatcacgtgaaggtgtgcaacgtgacattttgccgattgtagaagggtcgaatgttgcgacaaaatacggatcagtaaaaacggattatattttattcgttgcagctggagcgttccatatgtctaaaccgtcggatttaattccggaattgcaagggagatttccgattcgagtagaattaacaaaattatcgacagacgattttgttaaaatactaatcgagcctgacaatgcgttaattaaacaatatatggcattattagcgactgaaggtatagaaattgaattttcagacgaagctattcgtaagattgctgagattgcttatcaagttaatcaggatacagataatattggagcaagaagacttcatacgattatggagaagctccttgaagatttatcgtttgaagcatctgaaattacgttagagaaaataacgataacacctcaatacgttgaggagaaattagcaacaattgctaaaaataaagatgtgagccagtttattttgtaatagtgtcatcaggtgactcgccctagtttccaagtgatgaaaaaatatgtgagtaacatgtaggaggaacttttgaaatggaattattagcaaaaacgagaaaattaaatgcgttattacagagcgcagcagggaagcctgtaaactttagagaaatgtctgacacaatgtgtgaagtaatcgaagcaaacgtattcgtagttagccgtcgtggtaaattactaggttatgcaattcaccaacaaatcgaaaacgaacgcatgaagcaaatgcttgcagaacgtcaattcccagaagaatatacacaaagcttattcaacattacagaaacatcttcaaacttagatgtgaacagtgcttacacagcattcccagtagaaaacagagaattatttggtcaaggtttaactacaatcgtaccaatcgttggtggcggtgagcgtctaggtacattagtattagctcgtcttggtcaagagttcttagatgatgatttaatccttgctgagtacagctcaactgttgtaggtatggaaattttacgtgaaaaagcagaagaaatcgaagaggaagcacgtagtaaagctgttgttcaaatggcgatcagctcattatcttacagtgagttagaagcgattgagcacatcttcgaagaattaaatggaacagaaggtttacttgttgcaagtaaaattgctgatcgcgtaggaattactcgttctgtaatcgtaaatgcactacgtaaattagaaagtgctggtgttattgagtctcgttctttaggtatgaaaggaacatacattaaagtgctaaacgacaagtttctacaggaacttgctaaattaaaaacaaactaatttgtaaaaaactctcctcgattgaggagagttttttatgtgcaatggatagatggtgcttgtgaaaagtgtcataagcgtgttttctgagaaaactattaattgtatttatttttttgcttaaaagaaatgaaggttggtaatactggaattcgagtatgaacaaagaaagttttacattgttcgcattttcgacttgattgtaatatttcagtatgatatagtaagcagtggtgtcagtacaaagtacacacgtttactgatttaagtgttggtgctacgtttgtagtttcgcttagagatgaagtaaacggaggatatcaaaaaccatttaggaggaactatattatgtcagtaatttctatgaagcaattgcttgaagctggtgttcatttcggacatcaaactcgtcgttggaacccaaaaatgaagcgttacattttcacagagcgtaacggtatctacatcatcgacttacaaaaaactgtgaaaaaagttgaggaagcttacagaacgatgcgcgacatcgctgctgaaggcggagacatcttattcgtaggtactaaaaaacaagcacaagaagctattaaagaagaagcaactcgtgctggtatgtacttcgttaaccaacgttggttaggcggaactttaacaaacttccaaacaatccaaaagcgtatcaagcgtcttaaagacatcgaaagaatgcaagaagatggtactttcgaagtacttcctaagaaagaagttgttcaacttaaaaaagagttagagcgtcttgagaaattcttaggcggtattaaagatatgaaaggtcttccaagtgcattattcgtagtagaccctcgtaaagagcgtattgcagttgctgaagcacgcaaattacacattccaatcatcggtatcgttgatacaaactgtgatccagacgaaatcgatcacgttatcccagcaaacgatgatgcaattcgtgctgtaaaacttcttacatctaaaatggcagacgcgatccttgaagcaaaacaaggtgaagaaactgttactgcgtaacaaagttggaaaggtgataaggggttcggccttttatcaccttttttaaggtataaacacctttataaaaggtataaatacatattttaggaggatgaaaagtatggcaatcactgctcaaatggtaaaagaattacgtgaaaaaactggcgcaggtatgatggactgcaaaaaagctttaacagaaactaacggcgacatggagaaggcaattgacttcttacgtgaaaaaggtattgcgaaagctgctaaaaaagctgaccgcattgctgctgaaggtttaactttcatcgaaacaaacggtaacgacgctttaatcttagaattaaactctgaaactgatttcgttgcgaaaaacgaaggtttccaaacactaattaaagaattagctgctcacttattaactaacaaaccagctaacgttgaagaagctatggctcaaacaatggaaaacggtaaaaaagttgaagagcacatcaacgaagcaatcgctaaaattggtgaaaaacttacacttcgtcgtttcgaaatcgtatcaaaaactgatgcagatgcattcggcgcttacctacacatgggtggacgcattggtgtattaacagttcttgaaggttctactgatgaagctgctgctaaagatgttgcaatgcacatcgctgcagttaaccctaaatacatcgaccgcgatgctgtaacagctgaagaagttgagcatgagcgtcaagtattaacacaacaagcattaaacgaaggcaagcctgagaaaatcgttgcaaaaatggttgaaggccgtttaggcaaattcttcgaagagatttgcttacttgaccaagcattcgttaaaaaccctgatatgaaagttcgtcagttcgttgagtctaaaggcggaacattaaaaggattcgttcgctacgctgttggtgaaggtatcgaaaaacgcgaagacaactttgctgaagaagtaatgaaccaagtaaaaggtagcaactaatacagattagggaacacattgtgttcccttttttaaaataaagatgtaagcaattggaggttcattatgagtaaaccgaaatataatcgtgtcgttttaaagctaagtggagaagctttagctggagagcaaggatttggaattaacccaactgttattaagtcagttgcggaacaagtaaaagaaattgcagaacttgatgtagaggttgctgttgttgttggtggcggtaacatttggcgtgggaaaattggaagtgaaatgggcatggatcgtgcaggggcagattacatgggcatgttagcgacagttatgaattcattagctcttcaagatagcttggagaatatcggaattcaaactcgtgtacaaacttcaattgagatgcgtcaagttgcagaaccttacattcgtcgtaaagcagttcgtcacttagagaaaaaacgtgttgttatctttgcagcaggtacaggtaacccatacttctctacagatacaacagcagcattacgtgcggcagaaattgaagcagatgtaattttaatggcgaaaaacaatgtagatggtgtatataatgcggatccatctattgatccaacagctacgaaatatgaaacgcttacttacttagacgtattaaaagaaggtttaggtgtaatggattctacagcttcttctctatgtatggataatgatattccattaattgtattctcagttatggaaaaaggtaatattaaacgtgccgttttaggcgaaaatatcggaacagtggtaagggggaaataaatatgggacaacaagtattgaagtcttcaaatgaaaaaatggaaaaagcagttgctgcttattctcgtgaattagcaacagttcgtgctggccgtgcaaacgcgtctgtattagataaggtacaagttgattactatggtgcaccaacaccagttgtgcaattagcgaacattacagttccagaagcgcgtttactagtaattcaaccttatgataaaacttctatcggtgatattgaaaaagcaattttaaaagcagatttaggcttaaatccttctaatgatggaactgtaattcgtattgcattccctgcattaacagaagaacgtcgtcgtgatcttgtaaaagttgtgaaaaaatatgctgaagaagctaaagttgctgttcgtaacgtacgtcgtgacggaaatgatgatcttaagaagcttgaaaaagctggcgagattacagaagatgatttaagaggatatactgaagatatccaaaaagaaacagataaatatattgcaaaagttgacgaaatcgcaaaaaacaaagaaaaagaaatcatggaagtgtaatagcgataacttcgcaattatgaccctcttcttaagggggtctttttacacttttaggcatacgtctgcttgctggagggtatgaatgatgtttaaaaactttcctttttttaaaggtaaaaaggacacatcgtttgatcatctcgttgaagaagtgaaaaaaggatatatcccagaacatattgccatcattatggatgggaatggaagatgggcaaagaggagagcaatgcctcgtattgcgggacatcatgaaggtatgcaagttgtaaagaaaattacaaaatttgcaagtaaacttaatgtgaaagtgttaactctttatgctttttcaactgagaactggaaaagaccgaaaaaggaagttgattatttaatgaagcttccagaagaatttctaggtacatttttaccagaattgattgaagaaaacgtacaagtccgagtaatagggcaaaaagatcgtcttcctacgcatacacgcagagcgatggagaaagccatggaagatacgaaagagaatacgggattaattcttaatttcgcgttaaactatggaagtcgagatgaaatcgtttctgctgtgcaacatatgatgaaagataatgaggaaggaaaaattcgttctgaagaggtaagtgaagaaatgctttcctcctacttaatgacgagttctttacctgatccagagttgttaatccgaacaagcggagagctacgtattagtaatttcatgttatggcaaattgcatattcggagttttggtttacagacgtgtattggccagacttcaaagaagaacatttgctaaatgcgattactgactttcaacatagagggcgcagattcggaggcgtgtagaaagagagggtttggtagtgaaacagagaattattactggagtggttgctgccgcgctattcattcccatcgtaatatacggtggcgtgccttttacggttttagtgtatgcacttgcttctataggtttatatgaattaattcgtatgaataagcttacgcttatttcagtaccgacagttttagctgcagtattattgtggattcttttaattccaagtagtgcatcagaactgtttacatggattggattaggtaaattggaaatcacatttgtgattgttttattacttttatcatatacagtcctttctaagaatacatttacttttgataatgcttcatttttactgatggcaacgacatatgtggcaatgggattcttatatttaaatgaaacgagaatattaggaattaaatatgtattttgcgcattatttgttatatgggctactgattcaggcgcatatttcgtaggaaaagcattgggcaagagaaaattgtggccagaaatcagtccaaataaaacgattgaaggttcattagggggcatcgtttgtggaattattgtggcacttgtttacaacgtgttcttcccagtcgaatcgaatgtagtaattttaattgtgctgacaattattatttctatttttggacaaattggtgatttagtacaatctgcttttaaacgtcattatggcgtaaaggattcaggtacaattttacctgggcatggtggtatattagaccgaacagatagttggttattcgttttaccaattctctacttcttattacaatataattaataaatgaacgaggggttggagtcatgaaaaacattagtttattaggtgcaagcggatcaattggtacacaaactttagatgtattacgctcgcacccagaccaattccgtctcgttgctttttctgtagggaaaaatattgactacgcagtaaaggtaattcaagaattttctccgcaaatcgtctctgtgcaaagagaagaagatgttttaaaattacaatctgtttcaggtaatacaaaaattgtatatggtagtgaaggacttttagaagtagcactacatccagatgcggagattgtagtaaatgctgttgtaggtagcgtagggttgttaccaacacttcgtgcaattgaggcgaaaaaaacaattggaattgcaaataaagaaacgttagtaactgcaggacatcttgtaatggaagcagcacgaaaacataatgtttcgttacttccagttgatagtgaacattcggctatttttcaatgcttgaatggtgaaaatgaaaaaagaatttctcgtcttattataacggcttctggtggaagtttccgcgataaaacgagggatgaattgcatcatgtgaccgtagaagatgcgcttcgacatccaaactggtcaatgggttcgaaaattacaattgattctgctacaatgatgaataagggactagaagtaattgaagcacattggctttttggtattccttatgagcaaatcgatgttgttttacataaagaaagtattatccattctatggttgaatttgaagatcgtagtgtaatggcgcagcttggttcacctgatatgcgagtaccaattcaatacgcacttacatatccggatagattgcctctttcagacacaaaacagttaaacttatgggaaatagggacgttgcattttgagaaaatggaccaagaacgattccgttgtttacgttttgcgtatgaagctggaaaagcaggtggaagtatgccagctgtaatgaacgcagcgaatgaagtagctgttgaagcctttttacaaaagagaattgatttcttaacagtggaagacctcattgaaaaagcaatgaaccatcacaatgtcattgcacgaccgagcttagaggaaattttggaaattgatgcggccacaagacggtttgtgatggaacaaatttagcaaaggtggttatggaattgaatacagcgattgcctttatattaattttcggtgcactcgtatttttccatgagctagggcatctatatttcgcaaaaagagcaggtattttatgccgcgagtttgcgattggttttggtccgaaaatattctcatttgaaaagaatgaaacggtgtatacgattcgattactgccccttggtggctatgtaagaatggctggcgaggatgcggacacagttgagttaaagcctgggaaaaaggttggccttgtattaaatgaaaaagacgaagttgtgaaattagtttttgatggatatgaaaagtatccaaatgttcgtgttattgaagtcgaacaagctgatttggagcataatttaacaatttcgggctatgaagagtacgaggaagagcttcaaacattccgagtgaatgaaaaggctcgtattattactgcgggggaagaaattcaaattgccccgtataatagacaatttggctcgaaaaaactagggcaacgcgctttaacaatctttgcgggtcctgcaatgaacttcattttagcatttgttatttttgtgattcttggatttgtacaaggggttcctgttgacaaaccaatggtcggaaaagtgatggataacagtgcagcacagcaagctggattgaaagagaatgatacaattcaagctattgatgggaaaaacacaagtacatggaaagatgttgttactattgtacgtgaaaacccaaataaagaaattacgttacaagtaaagcgtgataatgaacagtttaatgtgaaagtaacgccaacactcgataaagaaggtaaagaagaagttggtagaattggtgtctactctcctgtagagaaaacagtgatgggttctattaaatcaggttttgaacaaacgtaccaatggacgaaactaatttttgagtctcttgtgaaattagtaactggtcaattttctattaatgagttgtcaggtccagtaggaatttataatctaacagatcaagttgtagattatgggtttacgcgtgtactaagtttagctgcagttctaagcattaatcttggtttatttaatttattaccagttcctgctttagatggtggccgtttattcttcttcttaattgaagcgttacgagggaaaccaattgatcgccaaaaagaaggaatggttcactttattggttttgcattattaatgttacttatgttagttgtaacttggaatgacattcgtaagtttttcttgtaaaataaagtgaaacttataatgaaatagagctcgtagaataaaatccctcacctaactcgaggtgaggggttttactgcgtgtaagagtaaaatgaagaggtgcaaataaatgaaacaaagtatggtattcagtcctacattacgtgaagttccagctgatgctgaaattaagagtcatcagctattacttcgtgcaggttttatgcgtcaaaatgcttctggtatttatagctttctaccatttggattaaaagtattacacaaagtagaacgtatcgttcgagaagaaatggagcgcgcaggagctgtagaattattaatgccagctatgcaagctgcagaattatggcaagaatcaggtcgttggtattcttacggatctgaattaatgcgtatgaaagatcgtaacgctcgtgaattcgcattaggagcgacacatgaggaagtaattacggatcttgtgcgtgatgaagtgaaatcatataaaaaattaccgttaacattataccaaattcaaacaaaattccgtgatgagcaaagacctcgtttcggcttattacgtggaagagagtttctaatgaaagatgcctactctttccatgctacacaagagagcttagatgaagtatacgatcgcttatataaagcatactctaacatttttactcgctgtggcttgaatttccgtgcagttattgctgattctggagcaatgggcggaaaagatacacatgaatttatggtattatctgatgttggtgaagatacaattgcatactctgacacatctgattatgcagcaaacatcgaaatggctcctgttgtagctacgtatacgaagagtgacgaagcagaaaaagcacttgaaaaagtagcaacaccagaccaaaaagcaattgaagaagtatctgcattcttaaacattgcagctgacaagtgcattaagtctatggtgtttaaagtagatgagaaattagtagttgtacttgttcgtggtgatcacgaagtaaacgatgtgaaagtgaaaaatgtatatggcgcttcagttgttgagcttgcttctcatgaagaagtaaaagcattattaaattgtgaagttggttcattaggaccgattaatgtaacaggtgatatcgaaattattgctgatcacgctgtagcatcaattgttaacggatgttcaggagcgaatgaagaagggttccattatgtaaatgtaaatccagaacgtgactttaaagtaagtcaatatacagatttacgctttattcaagaaggagaccaatctccagatggaaacggaacaattcttttcgcacgcggaattgaagttggtcatgtattcaaattaggaactcgttatagtgaagcaatgaacgcaacattcctagatgaaaatggaaaaacacaaccacttattatgggttgttacggtatcggtgtatctcgtacagtagcagcaattgcagagcaatttaacgatgagaacggcttagtttggccaaaagcggtagcaccgttccatgtgcatgtaattccagtaaatatgaaatctgatgcacaacgtgaaatgggtgaaaatatctacaactcattacaagaacaaggctatgaagtgttattagacgatcgtgcagaacgtgcaggtgttaaatttgcagatgcagatttattcggtcttccagttcgtgttacagttggtaaaaaagcagacgaaggtattgtagaagtgaaagtacgtgctacaggtgagtctgaagaagtaaaagtagaagaacttcaaacatatattgcaaatattttaaaataagaagaggtacctcgtaatggggtaccttctctttctttgtaaacgtattttgtaaaagaagaggtgagaaatctttctttgtggtacgtttcaatttataatagcaaatggaaggagagtgcttatgtctttaacaaatgaacaacaagagcgatttcaaattttgctccagcagttgcaaataccagacgaccttataaatcaatatttacaaggcggtggtattgaaaggctcgttattgataaagcgaataaaagttggcattttgatttacaagtgccacgtattttgcctacagaattatatgaattgctagaaacaaagcttaagcaatcattttctcatattgcaagaacaacatttgcattagaaacagagaataaacaatttacagaagaagaagtgagggcgtattggccgctttgtacggaacgaattacattttcacctatgttcgcatacttaaagaagcagcttccacaggtgaatggagtgaagttgttaataaatgtaaataacgagctggagtctacggctttaaagaaaaacgttgcgaaaccagtaggggatcaatacgaagtttttggattcccgcgttttcagttagacacacatatacagcaaaatacagaagaaatgcaaaagtttcgtgaacaaacgcagcaagaagaccgtgagcgtgttatacaagctatggaagaaatggcgaagaagcaagctgaagaaagcagcgttgtgtatgaaggaccgattacactcgggtatcttattaagccagatgaagagattacaccgatgcgagaaattcaagatgaagaaagaagaaaaacggttcaaggatatgtcttccatgtagaaacaaaagagcttcgtagtgggcgtacgttattaactttaaaaataacggattatacggattctattatgatcaaaatgttctcgcgtgacaaagaagatattccaatgctgcaatccttgaaaaaaggaatgtgggtgaaagcgcgtggttctgttcaaaacgatacattcgttcgagatttagtaatgattgcaaatgatattaatgaaataacaggaccgtctcgtaaagataaagcaccagaaggcgaaaaacgagtagagctgcatctccatactccgatgagtcaaatggacgctgtcactccagtttctaagcttgttgctcaagctggtaaatggggacatgaggctattgcggttacagatcatgccgtggctcagtccttcccagaggcgtattctgcagggaagaaggctggtgttaaagttatatatggtgtagaagcaaatctagttaatgatggtgtaccgatagcgtataacgaagcgcatcgtttacttgcagaggaaacgtatgttgttttcgacgttgagacgacaggtttatcagctgtatacgatacagtcattgagttggctgccgtaaaagtaaagggtggcgaaattattgatcgctttgaatctttcgcaaatccacatcaaccattatcagcgacgattattgaattgacaggtattacggatgatatgttaactgatgcacctgaagtggacgaagtgtttaaaaagtttgaggaatggatgggcgaccatacacttgttgcccataacgcgagctttgatatgggctttattaacgtaggttttaaaaaggctggactagaaaaaacgaataatccagttattgatacgttagaacttgcacgatttttattcccagaaatgaaaaatcatcgattaaatacgatgtgtaaaaaacttgatattgaattaacacaacatcaccgtgcgatttatgatacagaagcgacgggatatttacttgtgaaaatgttgaaagacgtaattgaaaagggatttgaatatcacgatcaattaaatgatagcatgggacaaggggatgcgtataagcgtggccgtccaagtcatatgacgttacttgccacatcagatgttggattgaaaaatttatataaacttgtttcatattctcaccttaattacttttaccgtgtaccacgtgtgccgagatcactattaaaaaaatatcgtgaagggattttagtaggaacggcttgtgataaaggtgaagtgtttgaggcaatgatgcaaaaggcacctgaagaggtagaagaaattgcccagttctatgattacattgaagtaatgcctccagaggtgttgcgtcatttagtagaacgtgagcttgttcgagacgaaggtcaattaaaaacaattatttctaacttagtaaaactaggtgagacgttagataaaccagttgttgctacaggaaacgtgcattatttagaccctgaggatgcgatgtatcgtaaaattttagtcagttcgcagggcggagccaatccgttaaatcgacattcattaccgccagtacatttccgtacaactgatgagatgttagaatgtttttcattcttaggtgaagacaaagcgaaagaagttgttgtaacaaatacacaaaagattgcgtcattaattggtgatgtgcatccagtaaaagacgatctatacacaccgaaaattgaaggtgctgatgatgaaacgcgtgatatgagttataaaatggcgcgtagcatttatggtgaagagttaccggaaattgtagaagcacgtttagaaaaagaattaaaaagtattattgggcatggattcgccgtaatttatttaatttcacataagcttgtgaaaaaatcgttagtagacggatatctagtaggttcgcgtggatcggtagggtcatcatttgttgcaacgatgatggaaattacagaagtaaacccattaccaccacactatgtatgtccgaagtgtaagcaatcagaattctttaatgatggttctgtaggttctggttttgacttaccagataaagaatgtcctgcttgtaatattccatatgtaaaagatggacatgacattcctttcgaaacgttccttggatttaaaggagataaggtgcccgatatcgatttgaacttctccggggaataccaaccacgtgcccataactatacgaaagtactgttcggtgaagactatgtatatcgtgcaggaacgattggtacagttgcggaaaaaactgcttacggatatgtaaaaggttatgcaaatgatcataacttaacgattcgaaatgcagagattgatcgcttagtagcagggtgtaccggtgtaaaacgtacaacaggacagcatccaggcggtattatcgttgtgccagattacatggatatctttgatttctcaccaatacagtacccagctgattcaattggtgctgaatggagaacaacgcattttgatttccactcgattcatgataatttattaaaacttgatatactaggacacgatgatccgaccgttattcgtatgttacaagatttaagtggtattgatccgaaaacaatcccaacggatgatccagaagtaatgaaaattttctctggtccagaatcgttaggggtaacggaagagcaaattaactgtaaaacaggtacacttggtataccagagtttggtacaaaattcgtaagacagatgttagaagagacaaaaccgacgacattctcagagttagtccaaatttctggactatcacatggtactgacgtatggcttggtaatgcaaacgagttaatttataacggtacatgtacgctgagcgaagttatcggttgtcgtgatgacatcatggtatatttaatctatcaaggtctagatccatcattagccttcaaaatcatggagtcggttcgtaaaggtaaaggtgtaccggaagaatgggaagaagacatgaaaaataataatgtaccagattggtatattgattcatgtaagaagattaaatacatgttccctaaagcccatgcggctgcttacgtacttatggctgtacgtatcgcatactttaaagtacattttgcactgttattctatgccgcatattttacagttcgtgcagatgattttgatgtagaggcaatggcgaaaggttcagcatctatacgtgcaagaattgatgaaattgctcaaaagggactcgatgctgcgccgaaagagaagagtttattaacagtactagaaatgacacttgaaatgtgtgagcgtggatactcattccaaaaggtggatttataccgctcacatgcaacagaatttattattgatggagacacattaattcctccatttaatgcggtacctggtcttggtacaaacgcagctttaagtattgtggaagcacgtaaaaatggagacttcttatcaaaagaggacttgcagcagcgtagtaaggtttcgaaaacaattattgagtatttagatagtcaaggttgtttaggagatttaccggatcaaaaccagttatcactgttctagtaggtaggaaaagtctttgcaaatcaacatttcctatgatatactattaaccgagataaccatgtcatgtatattgtgtaaagaaaagagtggggaaacccactctttcgtgttactatctatgttttctctacgtagataggtaaaagatttctgtcgtatatacatattttgttacaagttttacttcttaaatttggtaatactaagacagataatccctgctgaacagcaggggcttttgttagctaacgagaaagaataagatagaccgtttttaaagtggcggggtcttcttcttttaaatggtacatgacggcaggaaggaggctgtttatggataagaaagtcacagaagttgtagaagcatttgcgcagccgatcgttgaagagttaaatcttgaacttgtagatgtagagtatgtgaaagaaggacaagactggttcttacgcgtattcatcgattctgaaaagggagtcgacattgaagaatgcggtgcggtaagtgaacgtttaagcgaagctttagataaagaggatccaattcctcatctttactttttggatgtatcatctcctggagcggaacgcccattaaagaaagaaaaagacttccagcaagcggtaggaaaacaagtggcaattaaaacatatgagccgattgatggtgaaaagatgtttgaaggaaaactgctttcttacgatggtacaacaataacattattattaacaattaaaacacgtaaaaaagaaatccaaatttcgatggataaagtcgcaaatgcgcgacttgctgttacgttttagttagaagggggatcttcatgagcactgagttattagatgctttgctcgtattagaatctgaaaaaggcattagcaaagacattattattgatgcgattgaagcagctttaatctctgcttataagcgcaattttaatcaagcacaaaacgttcgtgtgagctttaacccagaagtgggaacaattcaagttttagcacgtaaagacgtagtagacaatgtgtttgatccacgtcttgaaatttctgtagaggaagcaagacaaattaatccaaactaccaagatggtgacgtactagaaattgaagtaacaccaaaagactttggtcgtattgcagcacaaactgcaaaacaagttgtcacacaacgagtgcgtgaagcagagcgcggtgttatttactctgagtttagtgaccgtgaagaagatattatggtaggtattgtacaacgtcaagatgctcgtttcatctatgtaagcttaggaaaagtagaagctttattacctgtaagtgagcaaatgcctaatgagcaatacaaaccacatgatcgtattcgcgtattcattacgaaagtagaaaaaacgacaaaaggaccacaaatttacgtatcacgtacacatcctggtcttttaaaacgtttattcgaaatggaagttcctgaaatctatgatggaactgtagaaattcgttctgtagcacgtgaagctggcgatcgctctaagatctctgtatatgcagagaacactgatgttgatccagttggttcttgtgtaggaccaaaagggcaacgtgtacaacgcattgtagacgaattaaaaggtgaaaaaattgacatcgtccgctggtcaaatgatccagttgaatatgttgcaaatgcattaagcccatcacaagttgttaaagtacttgtagatgaagaagaaaaagcgacaacagtagttgttccagaccaccagttatcattagctatcggtaagcgtggacaaaatgcacgtcttgcagctaaattaacaggctggaaaattgatattaagagtgagtctgatgcgaaacaacttggtattgtaacagaagaagatagcgtaatcgcatttggattcgattcagtggaagacgaaatcgaatagaggtgatgagtatgagcaatcgaaaagttccgttacgaaaatgtgttgcaacgcaagaaatgaaatcaaaacgagagctcgttcgcattgttcgttccaaagagggagaagtgtccattgatttaactgggaaaaaatcaggacgaggtgcttacttgtcgaaggacaaggagagcattcttcaagctcaaaagaaaaatgttttggaacatcatctaaaagcgaaaatcgacggttctttatatgaagagcttcttgagcttgttgagaaggagtcgaaataagtgtccgattggaaatcgtttttaggactagcaaaccgggctcggaaaattatttcgggtgaagaactcgttttaaaagaagtacgaagtggcaaagcaaaacttgtattgctatctgaagatgcgtcagtaaatactacaaaacgcatcacagataaaactacgtactacaacgtaccaatgagaaaggtcgaaaatcgacaacaattagggcatgcgattgggagagatgagcgagtcgttgtagctgtgttagatgtaggctttgcgaaaaagctgcgtagcatgctcgatacaaattaccgggggtgaaggtatgagtaaaattcgagtgcatgaatatgcaaaaaaacataatatctcaagtaaagatcttatgacaaaactaaaagaaatgaatatcgaggtttcgaatcatatgacaatgttagacgatgaagtagtaaataaattagataatgaatatcaaactgaaaaaccttctgttgcagatgagtttgaagtagaagaaaaagttgttcgcagtaaaaagaacagcaataagaaaaagaaaaaaggcaaaggaaacgaagacaaacgtcaagagaactttgctggtagacaacaaactcaaattgtagaaacaccagataaaattactttctctggaagccttacagtaggagatcttgctaaaaaattaagcaaagagccatctgaaattattaagaagctcttcatgcttggaattatggcaacaattaaccaagacttggataaagatacaattgagttaattgctaacgactacggtattgaagtagaagaagaagtaattgtaagcgagactgagtttgaaacattcattgatgagcaagatgatgaagagaacttaaaagaacgtccagctgtagttacaatcatgggacacgttgaccatggtaaaacaacattactggattctattcgtaactcaaaagtaactgcaggcgaagcgggtggaattactcagcatatcggtgcatatcaagttgaagtaaacgataagaagattacattcttagatacacctggtcacgcagcatttacaacgatgcgtgctcgtggagcacaagtaacggatattacaatccttgttgttgcagcggatgacggtgttatgccacaaacggttgaagcaattaaccatgcgaaggcagcaggagtaccaattattgttgctgtgaataaaatggataaaccagctgcaaaccctgatcgcgtaatgcaagaactaactgaatatgaattagttccagaagcttggggcggagatactattttcgtaccaatttctgcaattcaaggcgaaggcattgacaacttactagaaatgatccttcttgtaagtgaagtagaagaatataaagcaaatccaaaccgctatgcaactggtacagtaatcgaagcacagcttgataaaggtaaaggaactatcgcgacattacttgttcaaaatggtacgcttcgagttggagatccaatcgttgttggaacttcattcggacgtgttcgtgcaatggtaagtgatattggtcgtcgtgtaaaagttgctggtccatcaactcctgttgaaattactggtttaaacgaagtaccacaggctggagatcgtttcatggcatttgctgatgagaagaaagctcgtcaaattggtgaatcacgtgcacaagaagcgttagttgcacaacgtggtgagaaatctaaattaagccttgaagatttattccaacaaatccaagagggcgatgtaaaagaaattaacttaatcgtaaaagcagacgtacaaggttctgttgaagcgatggcagcatcacttcgtaaaattgatgttgaaggcgtaaaagttaaaatcattcacactggtgtaggtgcgattacagaatctgatatcattttagcttctgcatctaatgcaattgtaattggatttaacgtacgtccagatgtgaacgcgaagcgtacagctgaattagagaacgttgatattcgtttacaccgtattatttataaagtaatcgaagagattgaagcagctatgcaaggtatgcttgatccagaattcgaagaaaaagtaatcggtcaagcagaagttcgtcaaacgtttaaagtaacaaaagttggaacaatcgcaggttgttacgtaacagacggtaaaattacgcgtgatagtggcgtacgtattatccgtgacggcgtagtaattttcgaaggacaacttgatacgttaaaacgtttcaaagacgacgtaaaagaagttgcacaaaactatgagtgtggtattacaattgagagatataatgatcttaaagaaggggacatcattgaagcgtacattatggaagaagtgaagcgatgattatcgcttcactctcattcgagtgtatgatttacgatgtgcattctttaaaagagaaacgtgcaattttacaacgtgtgttaactcgtgtaaaacagcgctataatgtagctgtttctgaagttgggcaccaagatgtatggcaacgtacagaaattgcaattgtttccgtatcctcaaatcgtgttatctgtgagaaagaaatgaatcgtgtacttgagtacatcgattcatttcctgaaattgaacgtacaataacacatttggaatggtattgaatgaggtgaagagttatgaaattacgtgcgaaccgtgtgggcgagcaaatgaaaaaagaattaggcgacattatcagtcgtaaaattaaagacccacgtattggatttgttacagtaactgatgtacaagtgagtggtgatttacaaattgctaaagtatatatttctgttttaggtgatgaagaacagaaagaaaatactttaaaaggtttagcgaaggcaaaaggctttattcgttcagaaattggccaacgtattcgtcttcgtaaaacaccagaaattacctttgagtttgatgagtctatcggatatggtcatcgaattgatacacttttacatgaaattaataaagacggtaaacgtgaagaataatggatagacatttgtctatccattttttcaatgcaaaataagttttggatatttactacgagagaattatgatgaggtgaacatatatggaaggtgtagtattattacataagccaaaaggcatgacatcacatgattgtgtatttaaattaagaaagatattgcgagaaaagagaattggtcatacgggaacattagaccctgatgtaacaggagtattaccaatttgcgttggaagagcaacgaaaattgcacaatttttaacaagtgaaacgaaaacatatgaaggtgaagtaacattagggttttcaacgacaactgaagatgcttctggtgaggttgttgaaacgaaaaatgtagatcgtactattactcgtaaggaagtagagaaagtccttgcggaattaacaggcacgattgaacaaatgccaccaatgttctcggctgtaaaagtaaacgggaaaaaattatacgaatatgcaagagcagggcaagaggtggaacgtccagttcgtacaattacaattcatgaattcatattacttgatgatcgtgaagtttttgaaggagaaaatatttcattccgtttccgtgtaacgtgtagtaaaggaacatatgtaagaacgttagctgtaatgatcggggaaaaacttggtttcccatcacatatgtcgcaccttataagaacggcatctggtgaatttttattagaagattgcatatcatttgaagaaattgaagaaaacgtgcaaaatggaacagtagagtctatcttcatttcaattgatgaagcattaagtaagtttccaaaaatggttgtagatgaaaagcaagcagagaaaataaagaatggtatgttcttaaaaaatgaattagaaataacagcaccatttattacagtgtttgataaaaatgatcgttgcttagcaatttatgaacatcatccgaaacatcctggtatgttaaagccgatgaaagtacttgtgaataatcaagaactaaagctataatgaattattggaaggattattacagaaaaaggtgaattcaagcgtgaaacttattcatttaactcatccacatgaacaaaataaattagaattaccacctactgtaatggcattaggattttttgatggcattcatttaggacatcaatgtgtaattcgaactgcgaaaaaaatagcggacgaccgaggatataaaagtgcagttatgacatttcatcctcatccatctgttgttttaggaaaaaaggatgcgcatgtggagtatattacaccgatgcgcgataaagaaaaaatagtcgaaagcttaggaatcgatatattatatgtaattaaatttgatgaatcatttgcagggttattaccgcaacaatttgtagatgattatattattggtttaaatgtaaagcatgtagtagcagggtttgattattcatatggacgtttaggaaaaggaaagatggagactttaccatttcatgcaagaggggagtttacacagactgtgattgaaaaagttgaatttcaagaagagaaagtaagttctacagcattacgaaagttaattcgaaatggcgaaatggagcaaattccatctattttaggtagagcctatactgtagcgggaacagttatacacggcgacaaacgtggacgtcaaattggttttccaacagctaatgtaggtttaagtgatgagtatttattgccacctgtaggtgtttatgcagtgagattaaaagttcacggtgaatggtacgatggtgtatgtaatattggatataaaccgacttttaaagaagatgagcgtcaattatcaattgaagtgcatttatttgaatttaacaaagatatatacgatcaaaatgttacagtagagtggcatatgcgtataagagcagaaaagaaattcaacggtatcgatgagttagttgaacaaatcgcaaaagataagaaaacagcccaagaatattttgtgagcgaaaagaatatacttgctttttcaaatgaaaagtagtattctatgttatgtactttatgacaaccattgcttggcattgcgactcaccgacgcttgctaggtaattgggggtttaattaataggaggtgaaataggatggctttaacacaagagcgtaaaaatgaaatcattgcacaatttagaactcatgagactgatactggttctccagaggttcaaattgctgtcctaacggagcaaattaacactctaaacgagcacttacgtactcacaagaaagatcatcattcacgtcgtggtctattaaagatggttggtaaacgtcgtaacttactaacttaccttcgtaatagcgatatcacacgttaccgtgaattaatcacaaagcttggcttacgtcgatagtcaaagaagcgggaatattcccgcttttttgttaggtaaaaatatatcttctacgctttatagcttacttaattttaggcaatactagaggtagaatattgtgatatactatccatttacatagaagaattgaatactttaaattgagaggggtacttaaatgagtcaagaaaagcaagtcttctcgatagatttagctggtcgccagctaacagttgaaactggtcagcttgcaaaacaagcgaacggagcagtattagtaagatatggcgatacagcggttctatctacagcaactgcatcaaaagaagcaaaaaatgtagatttcttcccacttacagtaaactatgaagagcgtttatatgcagtcggaaaaattcctggcggtttcattaaacgtgaaggtcgtccaagtgaaaaagcaattttggcaagtcgtttaatcgaccgtccaatccgtccacttttcgcagatggtttccgtaacgaagtacaagttgtcagcatcgtaatgagtgttgatcaagattgttcttctgaaatggcagctatgcttggttcttcattagcgttatcgatttcagatattccatttgaaggtccaatcgcgggtgcaacagttggtcgtattaacggcgaattcgttatcaacccaacagtagaacagcaagaacaaagtgatattcaccttgttgtagctggtacgaaagatgcaattaacatggttgaagcaggagcagatcaagtgcctgaggaaacaatgttagaagcaattatgtttggtcatgacgaaattaaacgtctaattgcattccaagaagagattgtacaagctgtaggtaaagagaaatcagaagtgaaactttatgaagttgacgctgatcttaaccaagctgtacgtgaaatggctgaagaagatatgcattcagcaattcaagtacatgagaaacatgcacgtgaagatgcaattaacgaagtgaaaaagcgtgttattgagcattacgaagcgcaggaagctgacgctgatacattaggacaagtaaatgagattttatataaaattgtaaaagaagaagtacgtcgtcttattacagttgaaaaaatccgcccagatggccgtaaaggtgacgaaatccgtccattagcatcagaggttggcattttatctcgtacacacggttctggtttgttcactcgtggacaaacacaagcattaagtatttgtacattaggtgcattaggcgatgtgcaaattttagatggtcttggtgtagaagaatcaaaacgctttatgcaccattacaatttcccatcatttagtgttggtgaaactagaccaatgcgtggaccaggtcgtcgtgaaatcggtcacggtgcactaggagaacgcgcacttgagcctgtaattccatctgaaaaagatttcccatacacagtacgtcttgtatctgaagttttagaatcaaatggttctacttcacaagcaagtatttgtggtagtactttagcaatgatggatgctggtgttccacttaaagctccagttgcaggtattgcaatgggtctagttaaaactggtgagcattacacaattttatctgatattcaaggtatggaagatcatttaggtgatatggactttaaagtagcaggtacagcacaaggtgtaactgcactacaaatggacattaaaatcgatggtctatctcgtgaaattttagaagaggcattacaacaagcgaaagttggtcgtgtgcacattctaaatcatatgttatctgttattccagagccacgcactgaattatcagcgtacgctccaaagattattacaatgacaattaatccagataaaatccgtgacgttatcggaccgagcggtaaacaaatcaataaaattattgaagaaactggcgttaaaattgacatcgagcaagatggcacagtattcatttcttcaataaaccaagaaatgaacgacaaagctaagaaaattatcgaagatatcgttcgcgaagtacaagtaggtgaaatctacgaaggaaaagtgaaacgtgttgagaaattcggtgctttcgttgaattattcagcggtaaagatggattagttcacatttctgaacttgcacttgagcgtgtaggtaaagtagaagacgttgtaaaaatcggtgacgtaattacggttaaagttatcgagattgacaagcaaggtcgtgttaatctatctagaaaagtattgctaaaagaagagcaagaaaaagaagctgctaaagaagaaaacaaacaagagcagcaataagcgaaagccagtttaactggctttttttgttatgtaaaaatatgatttatatatatttttatgtcagtataggtatagttttcattataacgctcaaattaacaaagataagaagaaaaatgtttttttatatagttaatttgggagggtttatatgaaagttcgtatattggcatacatatgtatattttctttatatgtcagtttaggctcttattctgtttttgcacaggataacttatatgaagaaattcaaaagcatgcaaaacaatatgagattgcacctcaaaatgcgatgattgataagatatggaaagcaacaccaggatataatggaagacaagttgatatggaagcatcctataacaatatgaagaagctaaaggaatttgatcaaaaacaccttgaatttaaggaagtatcaccgagtgtccacttagaagatttatcacctgctccaatttatagggggcatccgaataaaaagatggtgggattaacaataaatgtggcatggggaaacgagtatttgcctcgtatattagaaatattgaaaaagcatgatgtgaaggcgactttctttttagaaggacgttgggtgaaagaaaatttacgatttgcaaaaatgattgtcgatgcaaatcaagaagtcggaaatcattcttatacgcaccctaatatgaaaacgctatcgtctgatgaaatacgagagcagttacaaaaaacaaatcgaatgattgaagctgctacgaatcaaaaggtgagatggtttgccccgccgagtggaagttttcgggatgaagtcgtgaaaatcgctgatgatttccaaatgggaacgattatgtggactgtcgatacaatcgattggaagcgacctgagccagatgtactattgcagagagtaatgagaaaaatacacccaggtgctatcgtattaatgcatcctacttcgtcaacggcagaagcattagatacaatgattaaaaaattgaaggaacaaggatataaagtagggaatataacagaattactggatgaaaaacgtgtggattaaatacatttgcatgacattcatccttaaacttgttatcattaaataatagcacttatttagagaaactggcagtaggaggaaagtttttgattaaaaaatatacttgtaaaaatggtgtaagaatagttatggagaatataccaactgtaagatcggttgcgattggtatttggatccatgcgggatcaagaaatgaaaatgaaaaaaataacgggatttctcactttttagagcatatgttctttaaagggacagaaacacgtagtgcacgcgaaattgcagaatcatttgatagtattggtgggcaagtgaatgcttttacttcaaaagagtacacttgttactatgcaaaagtgctagatgaacatgctaaatatgctttagatgtattagctgacatgttctttaattcaacatttgatgaagaagaattgaaaaaagagaagaatgtcgtatgtgaagaaattaaaatgtacgaagatgctccagacgatattgtgcatgatatgttaacgaaagcaacatatgaaacgcatccgcttggatatcctattttaggaacagaagaaacacttgatacgtttacaggtgatacgctacgccaatatattaaggatcattatacacctgaaaatgtagttgtttcagttgcaggaaatattgatgaagccttcttacaaacggtagagcaatatttcggtagttatgaaggaacaacaaatcgcgaacaagtacatagtccaattttccattttaacaaagtagcacgtaaaaaggaaacagaacaagctcatttatgtttaggatataaaggcttacaaatgggacacgaagatatttataacttaattgtattaaataacgttttaggcggtagtatgagtagccgtttattccaagaagtacgtgagcaacgtgggttagcttactcagtattttcttaccattcttcttatgaagatacaggtatgttaacactgtatggtggaacaggtagtcaacaattagatacactgtatgaaacaatgcaagaaacattagaaacattgaaaaatacaggtattacagaaaaagagcttattaatagtaaagagcaattaaaaggaaacttaatgttaagtttagaaagtacgaatagtcgtatgagccgtaatggtaaaaatgaattgctacttcgtaagcatcgttcacttgatgagattatcgaaagtgtaaacactgtaacaaaagaaaatgtagatgggttaattcgtaacatgtttacagatgaattctctgcagcattaattagtccagatggaaaacttccaaaaggaataaaactataatcaacttttacgatgtatctgaaaataaccttctctctttttaaatgagagaaggttattttttttatacatatagaataggtactaattatagacaatgcaaatgaaaaatttagtaggggagtggagtgagtatgcgattaagtgaattaagcggtaaagaggttgtagatatagaaaaagcggaaaaaatgggagccttaggttatatggatttagagattaatgagaaagacggacaaatacaaacacttataatacctgtagggaagtggggaggttttaaaaaggaaccacaagaagtaagagtggcatggagtcaaataaagaaagtcggacacgatatgcttctttgtgatagtatagatcgttcaaattcggagtgaaggatggccattttggtcatctttttttgtatctacatagaaacctgataaatcatatgtgcatttggattttcaatcaccataaactcgtacattacatatgatgtggaggaaaaagaaaaagtaggcacttttcttataaatgacagaaaaagaaggtgaattagggaatgttgactgagatgcatattgctgtcataggaggagatgcaaggcagctagaagtaattcgtaagctagttgaattggatgcgaaactttctttgataggttttgatcagttagatcatggtttcacaggggcagcaaaagaaagtatacaaaatttagatttcacttctgtagacgcaattattttgccggttgccggtacaaatgccaaaggagaagtagatactattttttcaaatgaaaaagtttcaataacgaaagaacaaattgaaaatacaccagaacactttactatatattcaggtattggtacaccttacttggaaaatctcgtatctactacgaatcgaaaacttgttaaattatttgatcgtgatgatgtagcaatatacaattctattccaacggtagaaggtacattaatgatggtaattcaacataccgactatacaattcatgggtccaatgtaatggttctaggatttgggagaacaggaatgagtgttgcgagagcatttcaatcattaggagcccatgtcaaagttggagcaagacgatctgaacatattgcacgtattacagaaatgatgttttctccttttcatatgcaagacatagagaaagaagtaggaaatatcgatattgtaattaatacgattccgcatctcgttgtaacagcgaatgttattgcaaaaatgccagctcatacgttagtgattgatttagcttctaaaccaggcggtactgactttagatatgcggaaaaaagaggagtcaaagcattgctagcacctggattaccaggtattgttgccccaaaaacggctgggcaaattttagcaaatgttctttctcagttattagcagcagatgcaattgcaaaggaggaggaaaagaaatgagtttgaaggggaaacgaattggtttcggatttacaggttcacattgtacgtacgaagaagtaatgcctcatttagaaaaattaattgctgagggagcagaagtacgtcctgttgtttcttacactgttcaatcaacaaatactagatttggagaaggagcagagtggattaagaagattgaagaaataacaggttttaaagcaattaattcaatcgttggtgcagaaccactaggacctaaaattccactagattgtatggtaattgcaccactaacagggaattctatgagtaaatttgcaaatgcaatgacagactctccagtattaatggcagcgaaagcgacgttaagaaatggcaagcctgtcgtattggctgtttcgacgaatgatgctctagggcttaatggagtaaatctcatgcgcctaatggcaacaaaaaacatctacttcgtcccattcggccaagatgcaccagagaaaaaaccgaactcaatggtagctcgcatggagctgctggaagatacagtgttagaagcgctgcaagggaagcaattgcaaccggtggtcgtagaaaaattcagatatatgaattaaaaaacgaaaaaaaacggacaatttttgatgaaaccatcattcttactgtagaatatgataaaattaacgttattaagattagaaggggtattgtatactccttctgattctaagttatagaaggattggtatctagaaaggggcatagtgatggaaaagcaaaaaacttttcatgtcgctgtagttggagcaaccggcgcagttggtgaacaaatgttaaatactttagagaaacgagaatttccaatcgggaaattaacgttactttcatctaaacgatctgcaggtaagaaacttgtatttaaaggcgaagaatttacagttcaagaggcaactcctgaaagctttgaaggagtagatatcgcactatttagtgctggtggatctgtatcgaaacaattagcgccagaagcagcaaaacgcggtgcgattgttgttgataatacaagtgcattccgtatgacagaaaacgtgccacttgttgtacctgaagtaaatgaaaacgacttaaaagaacataatggtattattgcaaatccaaactgttctacaattcaaatggtagtagctcttgagccagttcgtcagcaatatggtttaaaacgagtaatcgtttccacatatcaagctgtatcaggtgctggtgcggcagctattgaagcactgcatgaacaatcacaagcaatcttaaatggcgaagaagttaaggcaaatgttcttcctgtatcaggtgataagaagcatttcccaattgcttttaatgcgattccacagattgataaattccaagataatggatttacgtttgaagaaatgaaaatgattaacgaaacgaaaaaaattatgcatatgcctgaattagaagtagcggcaacatgtgtacgtttaccagttgtatcaggacactctgagtctgtttacatcgaagtagaaaaagaaggcgtaacagtagcagaattaaagagcttacttgcaaatgcggaaggtattgttctgcaagataatccagaagagcagttatatccaatgccagctactgcagtaggtaaaaacgaagtattcgttggaagaatccgtaaagatttaaataacgataaaggattccatctttgggtcgtatctgataacttattaaaaggcgctgcatggaattctgttcaaattgcagagcgcttagtaaaattacaattagtgtaaacggctaagagaaggtgcaaaatatgaaaataattgttcaaaaatttggtggcacatcagtacgtgatgacaatggacgtaagcatgcgcttcatcatataaaaaaatcattagctgctggttataaagtagttactgtcgtatctgctatgggccgtaaaggtgaaccatatgcaacggatacgttattaagtcttgtaaatcaagaggaatctactatttctaaacgtgagcaagatttattattatcatgcggagagttaatctctgcaattgttttctctaatatgttgaatgagaacggtataaaagcagcagcattaaatggtgcacaagctggttttgtaacgaatgatgactttacgaatgcaaagattattgaaatgaattgcgatcgtatacatgaagagttagaaaatgtagatgtaatcgtcgttacaggatttcaagggcaaacgaaaaaaggtgatacgacaacacttggacgcggaggtagtgatacttcagcttcagcattaggtgttgcacttcatgctgaatatatcgatatattcactgatgtagaaggtgttatgactgcggatcctcgtattgtaaaagatgcacgtcatcttcaaactgtaacgtataacgaaatttgtaacatggcttatcaaggtgcgaaagtcgttcatccacgtgcagttgaaattgcgatgcatgcaaaagtgccacttcgtgtacgttctacgtattctgaaagtgaaggtactcttattgcagcatacgatggtgctacaaaagggcaggatgtagaagaacgtcctgttacaggtattgcccacgtatcgaacgtaacgcaaattaaagtacttgcaaaagaaacggcatacgacatacagcagcatgtatttaaagaaatggcaaacgaaggcattagtgttgatttaattaacatttctcctactggtgtagcttacacagtaaatgataatgtatcagctcgtgctgtcgaagtgctaaaacaacttggatatgagccaattgtgacagaacattgtgcgaaagtatctatcgttggagctggaatggcaggcatcccaggggttactgcaaaaatcgttacagctttagcggaaaaaggcattcaaatcctgcaatcggcagatagtcatacaacaatttgggttcttgtaaaagaaattgatttagtggaggctgtaaatgcattacatagtgcgtttgagctttcaaaagaaaagcaactggaacaataaggagtgagaccatgatagattttgggacaattgcaaccgcgatggtaacaccgtttgatataaacgggaatatcgattttgcaaagacaacgaaattggtaaattatttaattgataacggtacaacagcaatcgtggtaggaggaacgacaggagaatctcctacattaacttcagaagagaaagtagcgttatatcgccatgtcgtatctgttgtcgataaaagagtgcccgtaatcgctggaacaggtagcaataatacgcatgcttctattgacttaactaaaaaggcaacagaagttggagtggatgcagtaatgctagtagcaccgtattataacaaaccgagtcaagaaggaatgtatcagcattttaaagcaattgctgaaagcacgccgcttccggttatgctatataacgttccaggacgatctattgtacaaatctccgttgatacagttgttcgtttatcagaaatagaaaacattgttgctattaaagatgccggcggcgatgtgttaacaatgacagaaatcattgaaaaaacagcggacgactttgcggtatacagcggtgatgacggtttaacgttaccagctatggcagttggagcgaaaggtatcgtttcggtagcctctcatgttatcggaaacgaaatgcaagaaatgattacagcatttcaatcaggagaatttaagaaggcacaaaaattacatcaattacttgtaagagtaactgattcattatttatggcgccaagtccaactccagtaaaaacagcgttacaaatggttggattagatgtaggttctgtacgtttaccacttcttccattaacagaagaagaaagagtaacgttacaatctgtaatgcaatctatccctcgttaataaaaaatgacctagtgtagaactaggtcattttttattatatgcaaatctttttctcgttttctcacctatatgtgttcttataagaatattaatcgcttcttcattatgtgtataagaaaataatcgtactcctttaaccgagtcaaaaaatgatagatattatggaataaacgtaataaactacggtgtttgtttttagagaaatcccctcaaatttgacgtaattcataaaaaaactccattttgtaagtgtttttgttggattctagaaaaataaatcttgaaactccctattatgaaatgaatttagcatatgtatggctagttcttcaaaataatatggagtataaaatcgaagtaaatataaaggaaataccttcgatacttttgttgtcattccgttcttttactctttctttcgcacgatttaacttgtgttctatttcttgtatcaggtataatatggctaagtagcttagtacgggtatgcttagcaaaattgggaaaaattataatttaattaaattttcatatcatatcgaataagatatttgatttatataatgaaagagaggtgaaacctggtttaaaaaataaacaaggacatgatatcgcataacggtaaggacattcgtcttggacggtgaaaatatggtggttgtagagtttcccctggtgtctctgcaattttagtgaaatcagtgtttgcaagatttttaaaccaggcaacaacatgaagagaaaagagaatgagtctgttaaagtatttgctcttggtggagtaggtgaaatcgggaaaaacatgtactgtgttgaaattgattctgaaatctttatcgtagatgcagggttaatgttcccgggagatgaaatgtttggaattgatatcgttattcctgatattacatatttagtggaaaatcaagagcgagtaaaaggtttatttattactcacggtcatgaagatcatattggtggaattgtgtatgtacttcgtaaattatctattccagtctatgcaacgaaattaacagtaggacttatacaagaaaaacttggtgaagcgggcatgttaggccgtgtagacctaaaaacaatcgattcaaattcaacagtagaatttaacactacaacggtgtcattcttcggaacgacacatagtattccggattctgttggcgtttgtttccatacatcaaaaggtgcagtcgtatatacgggagactttaaattcgatcaaactccaattggaaatagtggagcagaccttgggaaaatggcgcaaatcggaaatgaaggcgtactttgcttattatctgatagtacaaacgcagagcgcccaggttatacaggttcagaaaaagaagttggtgtagaaatctctaaagtgttctatggcgcagaaggtcgtattatcgttgcttcatttgcatcaaatgtacatcgtattcaacaagtatttgatgcagctgctgaaacagggcgaaaagtagcggtagtaggacgtagtatggtgaaagtagtagacattgcaagacgtcttggttatttagatgttccagaaggtatggttatttcattacaagaagtagacaacttcccagagaaaaaggtagctattttaacgacaggtagtcaaggtgaaccgatggctgctctatctagaatggcaaaacaagcacataaacaaatttcaattcgtaaaggtgatactgttatcattgctgcttcgccaattccgggtaatgaaatatctgtatcaaaaattattgatttgttatttagagctggagctgaagttgtttattacggcgaaagaaaagttcacgtgtcaggtcacggtagccaagaagaattaaaattaatgttaaatttaatgaaaccaaagtactttgtacccgtacatggtgagttccgtatgcaaaaagcgcatgcatatttagctgaagatgtaggtattacaagagaaaatatctttatcgtagaaaaaggcgatgtaattgcttttggtgacgatgaagcgaacttagtcggtaaagtacaagctggtaatgttttaattgatggattaggtgtaggtgacgttggtaatatcgttcttcgagatagaaagatgttatctcaagatggaatactagtagttgttgtaacgcttggtaaagatgaaaagaaaattatctctggtccagaaatcatttcacgtggtttcgtatatgttcgtgaatcagaagcgttaattgaacgttctacagagattgtacgtatgattgttgagcagtcaattaaagaatattcaattgaatggtcaatgttaaaacaaaatattcgtgaattattagggcagttcttgtacgaagagacaaagagaaaacctatgattttaccgattattatggaagtataaaaaagatcacccttatgggtgatcttttttctttttaaccctatcgaatgaaatttataacttaagaaataatagttatatacgagtgaaaggggatgcgaaatgacagaacgtgatcgatatacaaatgaagaaaaagaagctgagccaaaagaagctggaaaagaggcttcgatagtcgaaaaaattcaacagcttggacagacaaatgtaccacagatgaatgaatcacgtattcattgtttaacgattatcggacaagtggaaggtcatgttcaattaccaccgcaaaataaaacaacaaaatacgagcatatcattccgcaaattgttgcgattgaacaaaatccgaaaattgaaggtttgcttttaatattaaatacggttggaggtgacgttgaagctgggctagcaatttctgaaatggtagcttcactttcaaaaccaacagtatctctagttttaggtgggggacattccatcggtgtaccgattgctgtttctactgactattcgtttattgcggaaactgcgacgatgacaattcatccaattcgtttaacaggtcttgtcataggtgtgccacaaacatttgagtatttggataagatgcaagaaagagtcattcgttttgtgacgaagcactcgaaagtaacagaagatcgttttaaagagcttatgtttgcgaaaggaaatttaacgcgagatattgggacgaatgtaattggtggggatgcagtaaagtacggtcttatagatgatgtcggcggtattggaaatgcaattcgaaaattaaacgaattaatagatgttcgtgcggaagatagtacagaagggacaatgctacaatgattttatatacaattatgccagagcaacttgtgtatccggccgattattcacaatgtgaaagtcaaaaagttgtaaatataaatggtgtggaattaatggtttctgaagaggaacatggatgttattctattgtacgtgtgctaagtacggacccacttcactatttagagtttgagcccggtcagaaaataaccttttagcaaaaagaaggattttgtttagaagctatggtataatataaaaaacaagacggttgagcagccatgagtaggctgctttcttctgtttatttagcattttacaagaagtgtaaaaatagaagatataaagacctgaaaaatagagaaaacagacatataaatagagcattttgaggggagctttatttatatgtagaacgcgaggtgaagaaatggcaaaacaaaagcaaagagggacgaaggcaaaggcaaggcgtacgataaagccaactttgtattatgaaattgtcggtttaactctttttgcactttcaatcattacgattttacagctaggcgttgtaggaaaatcgtttgtgttattttttcgcttcttctttggtgagtggtacataattggtgtgttaggtgtaatagctttatcggtttcctttgttataaaacgcggatggccgaaccttttaaataaacgattaattggattttatttaattgtattggcgatattaatgtttagtcatattacattatttaaccttcttacaaaagatggagcagtgcaaaatacttctgttattgtgagtacgaaagataacttctttcttgaaatgaaaaaggggccagatagcgttcatttaggtggtggtatgtttggtgcgcttatgttcgcaacatgttacttcttatttgacgaagtaggagcttatatcattggtattattctagttattctcggtatactttgtataacaaataagcatattggagaagtgttagcgccagttggtagaattcttagaagtcaatttcaagtgatgcaaggggattataaagattggagagctaaaagaacggctgaacaaacagaaaagaaaaaaacaacaagaagcacaagaagcaaacgtgctgcagaacaagaagaaattattgagccgatggaagaaatctcaattgatcctccgattatttcgaatttcactgagaattatcctgtaaatgaagaagaggataaacgaattgaagtagagcaagaagatttgattacttcaccgtttattgaagagactccgccaattgaagagccaaagaaaaagcgtggagaaaaaattgttgaatcgttagagagtgaagcgcaagcacctcctatgcaattttccaatgtagaaaataaagattacaagcttccttcacttgatatattaaaatttccaaagaataagcaagttacaaatgaaaatgcggaaatttatgagaatgctcgtaaattagaacgtacattccaaagtttcggagtgaaagcgaaagtaacaaaagtacatagaggtcctgcagttacaaaatatgaagtgtatcctgatatgggggtaaaggtaagcaaaattgtcagtttaagtgatgatttagcccttgctttagctgccaaggacattcgtattgaagcgccaattcccgggaaatcagctgtagggatcgaagttccgaactcagaagtttcgatggtaacgctgagggaagttcttgattctaaggctaataatcatccggaagagaagttgttaattggtcttggtcgagatattacaggtgaagctgtactagcccgtttaaataaaatgccccatttactcgtagctggtgcgacaggtagcgggaaaagtgtatgtattaacggtattattgttagtattttaatgcgtgcaaaaccacatgaagtaaaattaatgatgattgacccgaaaatggtagagttaaatgtatataatggtgtgcctcatttgttaacgccagttgtaactgatccgaagaaagcatcgcaagcattgaaaaaagttgtgagtgaaatggaacgtcgttatgaattgtttgctcatagtggtacacgtaacattgaaggatacaacgattatataaaagagcataatagtcaatcagaagcgaaacaacccgaattaccttatattgtagtaattgtggacgagttagcagatttaatgatggttgcttcgtctgatgtagaagatgcgattatgcgtctagcacaaatggctcgtgctgctggtattcatttaattattgcaacgcaacgtccgtcagttgacgttattacgggtgttattaaagcaaatattccatcacgtattgcattcgctgtatcttctcaaacagattctcgtacaattcttgacggtggtggtgcagagaagctattaggtcgtggagacatgctgtttataccaattggtgcatcgaaacctgtacgtgtacaaggtgcatttttatcagatgatgaagttgagagagttgtagaatatgttattggacagcaaaaagcacaatatcaagaagatatgattccgcaagatgttcctgatacgaagcaggaagtagaagatgaattatatgatgaagcggttcaacttgtagtggaaatgcaaacagcatctgtttctatgttacaacgtaggtttagagtaggttatacgcgagctgctcgcctaattgatgcaatggaaatgaatggtgtagtaggtccgtatgaaggtagtaaaccgagagaagtgctcattaatgatgtacaagaaaaaagttcttaaaaaaagcctaattgtttttacaattaggcttttttatatagtgtttttgttatatactatactcagcaataaagaaagggcttacatttaggggtgctctttagaatacgaatactttgattatgttttatgtaaatgttcgatatttaatgcagaaaaatgttggattttgttgacacgtatgagagcaagtggtaagattacttcgaaaagaatcactgcctcatataatcttggagataaggtccataagtttctacctggcaaccatgaattgctagactatgaggggaaaagtgtgtaacaaaggatgtaaaggatctttgtgccgaactttttctcgaaatgaggaatgtttatggtgcaaagttttttttatgcaataaagagtgaaaatttcattaaaaaaaattattattatttattcgacaattacgcttattttggtgtttagtcatttgtactatgttgtaagttgaaaaaagagaaaagaagtcttacatcagaggtcgaataattgaaatgcgggggagtcttatgtcagtaaaatccgatagtcgtcacctatatctacgggtgattgatcacatcaaagaaaaaattaaagatggggcttataaagaacgacaaaagttaccatcagagtttgatttagcgaaagaacttggcgtaagtagagcgactttaagggaagcgttgcgtattttagaagaagaaaatgttgtcattcgtagacatggtgtagggacatttgtaaatgcaaagccattattttcttctggaatagaacaactttctagtattacagatatgatttctagtgtggggaaaacaccaggaacaatctttttatcatcatctactacaactttaacagaagaggaaaaagagaagtttaatagtgaagatggttttaatgcagtgatgattgaacgcgtgcgtacagcagatggggaacctgttgtgtattgtatcgataaacttgcaaaagaaatattgccagatttatcgggttacaatgaggaatcattattaacggtgatacataataacacacataagcgcataacatatgcggttgcccacattgagccaattggctatcaccctaaaatctcaccgattttagaatgtgagcctgaaacagcactgcttgtattaaaacaaatgcactatgatcaaaatgatgagccaatcttatattctatcaattactttagagctgataaatttagcttccacgtattaagaaagcgtatgtaggtaaattcctttttagggaggtgacagcaagaagtaaggaacagcagcgtaagaataaataaatatatatcatttttggaggggtttctagtatgaagaaaaaagcaggccttttattatcattaacattagcagcaagtacagttttaggtgcatgtggtaactcggataaggcgagcagtgacaagaaagacacgaaagacaataaagacttcaaggttggtcttgtaacggatgttgggggcgttgatgataagtcattcaaccaatcttcttgggaagggttacaaaagtttggtaaagataatggtttaaaagaaaagacaaattatcgttaccttcagtctgaaaaagaggctgattatattccgaatttaaaaaaattctcgaaagataaatatgatttaacattcggaattggttataaattagagggtgcaattaaagaagtagcaaaagaatcgtcaaaacaacaatttgcaatcgtagatactgttgtagatgcaccgaacgtaacgagcattacgtttaaagatcatgaaggatcattccttgtaggtgcggtagcagctatgtcaacaaaatcgaataaagtaggatttgttggtggaatgaaaagtgatttaattagtaaatttgaaaatggatttaaagctggtgcaaaggcagtaaatccaaacattgaaatcgtatctgaatatgcagaagcattcgataagcctgaaaaaggtacagttcttgcttcagcaatgtatggtcaaggcgtagacgtaatttatcatgctgctggtggtacaggtaacggtgtgttcacagaagcgaaaaaccgtaagaaaaaaggtgaaaatgtttgggtaatcggtgttgaccgtgaccaacatcaagaaggtatgcctgaaaatgtaacattaacttcaatgattaaacgtgttgatgtagcagtagaaaaagtagctaaagaagcaaaagatgggaatttaaaaggtgggaaaattgaagagtttggcttaaaagatgacggtattggtatttcaaaaacaactgataacgtgaaaaaagttaaccctgaaattttaacaaaagtagaagagcttgaaaagaaaattacagccggtgaaattaaagtgccagctacagataaagagtataaagaatacgaagcttctctaaaaaaataaatagagaaatagcaaaggttagttcatagaactaacctttgtatgtataaaacttccgaattgcttaataagttaatagtgtaatagggaatgttccctgttaaaaggaggaacacaatggaatacgtaattgagatgaataacattacgaaagtattcccaggcattgtagcgaatgatgatattacgctgcaagtaaagcagggtgagatacatgctttacttggagaaaatggtgcagggaaatccacattgatgaatgtactatttggtttgtaccaaccagagcagggtgaaattaaaattaaaggtaaacctgtaaaaattacaaatccgaatatagcaaatgaccttggtattggaatggtccatcaacactttatgcttgttcataattttacagttacagagaatattattctcggaaatgaaccgaagaaaaaagggaaaattgctgttgaggatgctgctaaagaaattcaaaaactgtctgaacaatacggtttggctgtagatccatatgcgaaaatacaggatatttcagttggtatgcaacagcgtgtggagattttgaaaactctttaccgcggtgcagaaattttaatatttgatgaaccgacagctgtgttaacaccacaagaaattcatgagctaattcaaattatgaaaaagcttgtacaagaaggaaaatctattgttcttattacacataagttgaaagaaattatggaagtttgcgatcgttgtacgattattcgtaaaggaaaagggattggaacggttgacgttgcaaatacggatgaaaataaacttgcagaattaatggtcggacgtcaagtgaattttaaaacagaaaaaatagacgcgaagccaaaagaagatgtactttcaattgcaaaccttgttgttcacgatgcacgtcaactacctgctgtaaaaggccttgacttaactgttcgtgcgggggaaattgttgggattgcagggattgatggaaacggacaaagtgaattaatagaagcgattactggtttacgaaaagttgagtcaggttctattgcaattaaaggaaaagaaataacaaattggcctgttagaagaataacagaagaaggaattggtcatattccagaagatcgtcataaacacggactcgttcttgatttttctgttagagataatatagttcttcaaacgtactataaaaatccgttttcaaagaaagggattttaaattttagcaaaattacagaaaaagcaaaggctcttattgaacagtttgatgtacgtacacctagtgagcaaacgttagcacgcgctctatctggggggaatcaacaaaaagcaattattgcacgtgaagtagaccgaaatccagatttattaattgcggcacagccaacacgtggtttagatgtaggagcaattgaatttattcataagagattaatagagcaaagggataaaggaaaaggtgtattacttttatcattagagttagatgaaatcttaaatgttagcgatcgaattgctgttatttatgaaggggaaattgtagcaatagttgatgcgaaagaaacgaatgaacaacagcttggattgttaatggctggaggaacaaagaaggagcaggtgggtacaaatggctaaaaaacttttaacagaacgaacgataaatattttagtcccagtactatccgttattttcggcttacttgtaggagcgattgtaatgctagttagtggctatgatccaattgttggttatagtgcactttggacaggaatgttcggcagcgcaagtgcgattggtgaaacgctccgtacaatgataccgcttattcttgctggcttatcggtcgcgtttgcatttcgtacaggtttatttaatatcggggtagagggtcaattgttagttggttggcttgcagcggtttggttcggttatgcagtctcactaccagcgttccttcatattccattatcgattttatttgccgcattggtgggcggaatttggggcttcattccgggatatttaaaagggaagtttcaagtgaatgaagttattgtaactattatgatgaactatattgcgttgtatgtaacgtatgacatcattaagcgtttcttacatgcgggtaatgacaaaacgtatgatattaaagagagtgcgtcactatcttcagactggcttgcttctattactgacggttcacgtctacactggggaattattgtagcaattttaatcgctattttaatgtggttcttattagatcgaacaactttaggttacgaattaaagtctgtaggatttaatcagcatgcttctcaatatgcaggtatgaaagtttctcgtaatgtagtattctctatgacaattgctggtgcatttgcggggattggtggagcgatggaaggattagggacattccagagtatgacagcgatgtcttcgtttacaggagtaggatttgatgggattgccgtagcattacttggagggaataatccgtttggtataatcctttcagctttattatttggtggtttgaaaagtgcttcccctcaaatgaactttgaggcagatgtaccgtcagagcttattaatgtaattattgcatgtatcatcttctttgttgcatgtagttatgtgttaagatgggcgcttacacgcatgagcaaggaggggaaataaatgagctttttagatatattagccattcttgtgacgggtacgttatatacatcggcacctatcattttcacagcactaggtggtgtatttagtgaacgatcgggtgttgtaaatatcggattagaaggactaatgctatttggtgcatttattggagttgttacaaacttattaatgggtgatacttggggaacgatgactccatggattgcgttattatttgcggcaattggtagtgggttatttgcattacttcatgcggtagcttctattacattccgagcagatcaagttgtaagtggtgtagccattaacttcttatctcttggtttaacagtatttgcaattaagaagatttttgataaagggcagactgactttattcagtatcgtattgaaaagattgatattccaggcctttcggatattccggttttagggaaaatatttttctcgaacgtaccaataacgtcgtatattgccattattttagcattcgttgtttggtatgttatttataaaacaccgttcggtcttcgtctacgtgctgttggtgaacacccaatggcagcggatacgatggggattaatgtatataaaatgcgttatattggagtctgtatttcaggagtgtttgctggaatcggtggagcgatttttgcaatgtcaatttctaataacttctcaggggcaactattacaggacaaggtttcttagctttagctgctatgatttttgggaagtggaatccactaggcgcattaggtgcagctctattctttggttttgcgcaatctctaagtgtaacgggcggaacaattcctgtattagatcaaattccaagtgttttattaacgatattaccatatgtattcacaatattagcgcttgttggttttgtaggtcgttctgaagctccgaaagcattaggaactccttatgaaaaaggaaaacgataagtattttataagtataaaaaagctcgcacattagtgtgggcttttttacatagaatatatttaatacggaattttactatgttccttacatattaaagtttttagaaagaatcatatgtaagcataataagggagaaaagttgattttttatttctaaaaactgtatattgaagaggaatattcctatatacgtaaaggagggctataaatgaaactaatggaacaacaactacatgagttagatggtttgcgcgtacatattattccgactgataaatataaaacgaatacctttgtatttcgttttaaagcgcctttaaatgaggagacggtgacagagcgtgccttattgccatacgtattgcaaagtgcgacagaaaaattaccttctgtaattcgtcttcgtcaatatttagaagaattatacggatcttctttagcggtagatgtaagtaaaaaaggggaagaccatattatctccatttatgtagacattgcaaatgaagtttacttacatgatgcaccaccgttatttgaaaaagcgctttctatgttgtcagatattgtgttacatccagcaacggagggcaacggtttcctatcttctatcgtagaaagtgaaaaaagagcactgttacagagaattgaagccacttatgacgataaaatgcgttatgcaaacgagcgtttaattgaagaaatgtgcaaagtagaaccgtatcgtttaagtgcaaatggaaaaaaagagagtgttatgtctattacaaatgaaagtctgtatcaatattatcaaaaggtgttagcggaagatgaaatggatctatatattattggtgatatttcagaaaacgccgttgatcttgtaagtaagtatttttctatttcagctcgtccagtgagagaaagaaatgtactccttcatagacgaaataatgaagaaaaagaagttgttgaaaaacaagaattaaaacaaagtaaattacacatcggttatcgtacatttgtcacatataaagatgaagattattttgcattgcaattgttcaatggattgtttggtggcttttctcattcgaagttattcgtaaatgtgcgtgaaaaaaatagtttagcgtactatgcagcatcgcgctttgaaagtcataaaggtttattatttgttatgtcaggaattgaagcgaaaaattatgaaaaagcagttgagattattaaagaacaaatgcttgcgatgcaaaacggagagttttctgaagaagaaatacatcaaacaaaaagtgtcatccaaaatcaaatattagaggcaattgatacaccacgtggctttgtagaaatgctatatcatggtattatttcagatcgtacacgtccagttgaagaatggcttacaggtatagaaagtgtgacaaaagaagaaattgtaaaagttgctaaaaatattgaactagatacaatttactttttacaaggaacggagggagagtaagtggagaaaattgtttatgagcaattaaaagaaacactctattatgaaaaacttcctaatggattagatgtatatgttttaccgaaacaaggatttaataaaacatttgcaacgtttacgacgaaatatggttctgtagataatacatttgtaccattagggaaagaagaaatgattcgtgtgccagatgggattgcacattttcttgagcataaattatttgaaaaagaagatcatgatgctttccaattgtttagtaaacaaggagcatcggcaaatgcttttacatccttcacacgaacagcttaccttttttcaggtacttcaaacgtagaacaaaatttaaatacattgctaaacttcgtacaagagccctatttctctgaaaaaacggttgaaaaagagaaggggattattgggcaagaaattcaaatgtatcaagataacccagattggcgtttgtactttgggttaattgatagcttatttgtaaaacacccaattaaaattgatattgcggggacaatcgaatctattagtaaaattacgaaagatttattatatgaatgttatgaaacattttatcatccgagcaatatgttattatttgttgtgggtgcaattgatccagagaaaacaatggatttagtacgtgaaaatcaagcgaaaaaagattataaaaaccagccagaaattgtgcgttcatttgaagaagaaccaaatgaggtaaatgaaaagaaaaaaattatttcaatgcctgtgcaaacaccgaaatgtttagttggtattaaagcgactaatttaaaagaaaaggggcaagcgcttttaaaacaagaaattgcgcttacgttacttttagattatttatttggaaaaagttctgttcattacgaagctttatataatgaaggacttattgatgattcattctcgtatgactatacagaagaaaataacttcggttttgcaatggttggtggtgatacgaaacaacctgatgcattggcagatcgtttaaaagatattttattaaaaacagattatgatcaattagatgcggcggcattagaacgagtgaagaaaaagaaaattggtggttttttacgctcgttaaattcaccagaatatattgcaaatcaatttacacgatacgcgtttaatgaatctagcctatttgatgcattgactgtattagaaggactaaccgttcaagacttacaagaagtagcgggattattgttatcagaagaaaaaatgagtgtttgtcaggtgttaccgaaaaaataaaattttaaagataccctcatcttatcattgaaaaattgtaagatgagggtattatttagttgtgtgaaaattgaacttgtagagataagagagggaatttatgaaaaagtatgcgttagtaactggagggagcggagggattggctctgctatttcgaaacaattaattcaagatggatatacagtttatgttcattacaataacagtgaagaaaaggtattggaattgcagaaggcatggggagaagttatccctgttcaagctaatttagcttctagtgatggagcagaacgattgtggggacaaattgaacatcctattgatgttattgtatacgcagctgggaagagtatttttggactagtaacagatgtaacaaacgatgaattggattatatggtagaacttcaagtgaagaacgtatataaattactttctatggcacttccgcctatgatcgggagaagaagtggtaatattgtaattgtttcatctatatggggacaaataggggcttcttgtgaagtactttattcaatggtaaaaggggcgcaaaattcatatgtgaaagctttagcgaaagaagtttctttaagtggattacgtgtgaatgcagtagcaccaggagcaattgaaacggaaatgttaagtgttttttctgaagaagataaaatgggaattgctgaagatataccattaggtagaataggattaccagaagaagtagcgaaaacagtttcatttctcgtatcaccaggagcgtcttacataactggacaaattatcggagtgaatggcggttggcactgctaaaaaattcttacataaaaaatgaatagttgcacaaattaaggatgattttattactcaatagtgaggtgcttaattatgtcagtattagataattttgatcagtggaagagctttttaggagaacgtttagagcaagcgcaagacaaaggtttagatggcggtgcggtatcagatatggcatttcgagttggcgactatcttgctaatgaagtagaaggacgcaatgaccaagagaaattattagctgagctttggaaagttgctgatgaacaggagcaacatacaattgcaaatttaatggttaagttcgtacaacataagtaaaagtagagaggagattctcctctctactttttttgtataataattacacaggatagattatacatttagcttccctattagggtgaaatcatataatatagtacgtaggtgtaaagtaagcaaggggagtgatcttggatgattgaatggtattttgaatatgaaatacataaaaaccgacctggcttgcttggtgacgtttcttcgttaatcggtatgctcggcattaatattgtcacaattaatggtgtagataatgcacgacgtgggttacttcttatgtgtgataatcaagagcaaatctctagacttgaatcaattttaaatacgatggataacataacggtaacgaaatatcgtccgcccaagctaagagataagctagcggttaggcatggtaggtacatacaacgagatgcagatgataagaaaacatttcgatttgtgcgtgatgaattaggcttacttgtagactttatggcagaaatcatgaaaaaagaaggccataaactaattgggatacgcggaatgcctcgtgtcggaaaaacagaatccattgttgctgcaagtgtttgtgcaaataaaaggtggttatttgtatcatctactcttattaagcaaactgttcgcagtcaattaattgaagatgagtatagcgatgacaatattttcatcctagatggaattgtgtcaacgaagcgtgctaacgaaagacattggcagctcgttcgtgaaattatgagattgcctgcaacgaaagttgtggaacatcctgatgtatttgtgagtcagtcagaatacacattggatgattttgattatattatcgagttgcgtaacgattatgatgaagaaatacaatataatttagtagatgaaattgagcaaggtacgcaaaataatttctctatgtttgacttttaaagaaatattgaggtgttagtagtgacggaattgggacaaaagctgaaagaaacaagagaagcgaaaggcttgtctattgatcagctgcatgagattacaaaaattcaaaaacgccatttagtggcaattgaagaaggcaattatgatgtattgccaggagctttttatgcgcgtgcattcattaaacaatacgcagatgcggttggattaaatggagaggaactgcttgtagaacatcagagtacgataccacaatctgaaaagcgtgaagttccacaagtatcaacgggacaaaaaacacaagaaacaatgcaaaaatcttcatcatggccaattgcagatcacatgccgaaaatcttagttgcgctgttagtcatcgcagttggagtggtaatctggtttgtgtttcaagcgttaactggaaaagatgatgaaaaagttccaagcgctcaaagtgagaaaattgaagttcaaaaagcgaaagattctccgttagatacgaagaaagatgaagtgaaagcggaagagccaaaaaaagaggaaccaaagaaagaagaaccaaagaaagaggagcaaccagcacaaccaactggacagcaagaagtgaaagtagttggaacaactggaaaggtatctactttggaaattcataataataaaacattagaactggaaatttcagctaagggtacaagttatgtagatgttaaggatgatgcgggtaacgaaattctaaacactacagtacaaagcggtcaaacagagaaacgcgatgtatcaacattaaaagaagtacgacttaatattggaagtgcaccgaatgttgaaattaaactgaatggccaagtgcttgctttcccgttagatccacaaaaagaatatcaccaaagattggtgattaaaaaccaagggatagagcaaccagcacaataacagtcatcgcttcgatgactttttttcgatgaacaaatgtttttgatatgatggaggaatagctgtgaatttaccaaataaaattacaatatctagaatcttcttaattccaatttttatggtaattatgttagcgccctttgattggggttcatacaaaattggtgatgttgatttgccaattcaacatttagtgggggcacttatctttatcattgcttcagctacagattggattgatggacattacgcaagaaagtataatcttgtaacgaatttagggaagtttcttgacccgttagctgataaattgcttgtttcggcagcacttattacattggtagagatgcaatatgtaccggcttggattgttattgtaattatcagtcgtgagtttgcggtaacaggtttacgtcttgtacttgctggaacaggggaagtagttgcagcaaaccagctaggaaaaattaagacgtggacacaaattattgcaattgcagcatatttattacacgatgtacctttaaatttaatccatattccagttgcagatatcttcatatggattgcattaatctttactgttatttcaggatgggattatttctggaaaaatagagctgcttttgtaaactcaaaatagaagtttatgggggaattgggatgaatgctgagattattgcggttggaactgaattattacttggacaaattgcaaatacaaatgcccagtttttatctgaaaagttagcttcaatcggaattaacgtgtactatcatactgttgttggtgataataataagcgattgcaaaaggcgattgaagctgcggaagaacgtgctgatatacttatttttacaggtggattaggaccaacaaaagatgatttaacgaaagaaacgatagctgctagtttagatgaagagcttgtgtatgatgaaaaggcattagccttaataagtaattactttaagcgtacaggccgtgaatttacggagaataataaaaagcaagcgctcgttttaaatggagcaacagtatttgcaaatgaccacggtatggcgcctggtatgggggtaaataagaacggaaaagtttatattttattaccagggccgccaaaagaaatgaaaccaatgtatgtaagttacgtagagccttttttacgtaattttacaacaggagaaaacatttattctcgtgtgcttcgtttcttcggtattggggagtcccaattagaggtgaaagtgcaagatttaattgatggacaaacaaacccaacaatcgccccgttagcaaatgatggagaagtgacattacgtttaaccgctaagcatcaaaatgttagcgaagcggagaaattaattcaacatgtggaagatttgattttagaaagagtaggagaatttttctacggatatgaccaagaatttttgcattataaggcaatcgagttattgaagagaaaagggttaactttagcgtgtgcagaaagtttaacaggtggtctttttggaaatcaagtaactgaaaacgctggtgtttcttctgtatttaaaggcggtgtcatttgttatcataatgatgtgaagcaacatgttttacgtgtgcctgaagaagtgttgcatactgatggtgcagttagtaaagaatgtgctcgttatcttgctgaaaatgttaaggatgtattaaaagcggatatcggaattagtttcactggggtagcagggccagatgcttcagaacagaaagaaccaggaacagtatttgttgggctttcgattaaggatgaaccaactgtagtctttcctcttaatttaagcggaagtcgtcaacaaattagagaacgaacagcaaaatatggattttatcatttatataaaaagctagaagagatataagtttcttctagttttttttacggttaaatttagatattatttgatagaaaataaaaaaatcgaataaatgttcgatttttgttggcaaattgaattgaaaataggtataataagattagcaattcagttaaggaggaattttgaatgagtgatcgtcaagcagcgttagatatggcgttaaaacaaatagagaagcaattcggtaaaggttcaattatgaaattaggagaacaagcggagcgtagagtttctacggtttctagtggttctttagcacttgatgtggcactaggagtaggcggatatccacgtggccgtattatcgaaatttacggacctgaaagttcaggtaaaacgacagtttcattacatgcaattgcagaagtacaacgtcaaggtggacaagcagcattcattgatgcggagcacgcaatggatcctgtatatgcacaaaaattaggcgttaacatagatgaattactattatcacagcctgatacaggggagcaaggattggaaatcgcggaagcacttgtacgaagtggtgcggttgacattatcgtaattgactctgtagcagctcttgtaccgaaagcagagattgaaggcgatatgggtgactcacacgtaggtttacaagcacgtttaatgtcacaagcacttcgtaagctttcaggagcaatcaacaaatcaaaaacaattgcaatctttattaaccaaattcgtgaaaaagttggggttatgttcggaaacccagaaacaactccaggtggtcgtgcgttgaaattctattcaactgttcgtcttgaagtgcgtcgtgcggagcaattaaagcaaggtaacgacattgttggtaataaaacaaaagtaaaagtagtgaaaaataaagtagcaccaccattccgtgttgcggaagttgatattatgtacggagaaggtatttcaagagaaggtgaaatcttggatatggcttctgagcttgatattgttcaaaagagcggtgcctggtattcttataatgaagaacgcctaggacaaggtcgtgaaaattcgaagcagttcttaaaagaaaatacagatttaagagaagaaattgccttctttattcgtgagcatcacggaattagtgaagattctggtgctgagggcgcagaagattcaactcttcttgattaaaaaaataaaagacacggtctcgtgtcttttatttttttatctactattaaggagcgtaatactatagataaaaatattttttgacttcaaatgggttgtgtaaagaaggatatttaaatattttaagtaaagaaatgggaattactaaggttttccagtataataggctccttactttttaaatttaggtcacattcaaggctgaaggtaaagaaagtaaaagtagacaacgcttgacaatgaaaattacgatagatacaatgagaatgtatattttttcttatatacgatatactcttctcaagaagagaagtaatattcggagtaaggtttaaatcttaccgaaataataatatgacattttaattgtgaaatgaagaaagtcccttaaaaaaagcgggacgacggtctttgctgtatgttgtaattcaatgtacatgccgacagtcttttttcattcatagcaaggggaggtgaaatcatgagtagtacagtttggatactcatctccattttgcttgcaacaacagtcggtgcagttgttggcttttttgttcgaaagtctattgctgaagcgaagattaatggtgcggctaatgaagcgaaacgtattctagacgaagcgaatcgtgaggctgaagcacttaagaaagaagcgcttttagaagcaaaggatgaaattcatacacttcgtacagaagctgaattagaaattcgtgaccgtagaagcgaattacaaaaacaagaaaatcgtttaatgcaaaaagaagagaaccttgatcgtaaagacgaaacgctcgataaacgcgagcagcagttagagaagaaagaggattctcttgtagcgagacaacaacagattgaagagttggaaagcaaagtgggagagttagttcaaaagcaacaaacggaattagagcgcatttccaatctgacacgcgaacaagcgaaagcaattattcttggtaaagtagaaaatgaagtttctcatgaaatcgctgttatggtaaaagaaagtgaagttcgcgcgaaagaagaagcggataagaaagcaaaagagattttatctcttgcaatgcaaagatgtgcagctgatcatgttgctgaaacaaccgtttcggttgtaaatcttccaaatgacgaaatgaagggacgtattatcgggcgtgaaggtcgtaatattcgtacgttagaaacgttaacgggtattgacttaattatcgatgatacaccagaggcggtaatcctttctggattcgacccaattcgtcgtgaaacagctcgtatcgctcttgataaactagtacaggacggacgtattcacccagcgcgtattgaagagatggtcgaaaaatcaagacgtgaagtggacgagtatattcgcgaagtaggagagcaaacaacgtttgaagtgggtgttcatggattacatccagatttaattaaaattttaggtcgtttaaaataccgtacaagttatggtcaaaacgtcttaaaacactctatggaagttgcatatttaactggacttatggcggcagagcttggcgaggatgaaaaactagcaagacgtgcaggtctattacatgatatcggaaaagcgattgaccatgaagtagaaggaagccacgttgaaattggtgttgaacttgcaacgaaatataaagagcatcctgtagttataaacagtatcgcatctcaccatggtgacacagaaccaacttctatcattgcagttttagttgcagcagcagatgctttatcagctgcaagaccgggagctcgtagtgaaacacttgaaaactatattcgtcgtcttgaaaagttagaagagatttcagagtcttatgaaggcgttgaaaaatcatttgcaattcaagcaggacgtgaagttcgtattttggtaaaaccagatacaatcgatgacttagaagctcatcgtttagctcgtgatatccgaaaacgtattgaaaatgaactggattacccaggacatattaaagtaactgttattcgtgaaacacgtgcagtggaatacgcaaaataaagtggtgaaacaccactttatttttttgtgttggaattggataaaataaagacagttagttatatagcataaaagtgaagcaaacttataataaagatattataaggaatttacttgatgctatagcaataaaaaatgcagtacatagaaagggtaagacatatgagaatattatttgttggggatgtagtaggatctcctggtagaggtatgattcaacaatacgtaccggcattaaagaaaaaatatacacctacagtaacaatcattaatggagaaaatgcagcaggtggccgtgggattacagaaaaaatatatcgaaactttttagagtgtggggcgcaggcagttacacttggaaaccacgcttgggataatcgtgaagtatttgaattcatcgatgatgcaaaatatcttgcaagaccagctaacttcccagaaggaactccaggaaaaggacttatctttgtgaactgtaatggaacagaagttgcagttattaatttacaaggacgtactttccttcctccaattgattgtccattccgtaaagtggatgaattaattaatattgcgaaaaaacgtacgaatattatatttgttgatttccatgcggagactacaagtgaaaaacaagcgctaggttggtatgtagatggacgtgctacagcagtagtaggtacgcatacgcatgtccctacagcggataaccgtattttaccaagcggaacggcatacattacagatgttgggatgacagggccgtatgacggaatattaggtatggacagagaagcagtattgaagaagtttttaacaaacttaccagtacgatttgaagtaacaaatggcagaacgcaattaagtgcagtgttaattgatgtggatccaaatacaggaaaagcaaagagaattgaacgtattttaattaatgacgatcaaccattttttgagtaaatttccgtcaaattttagataagttattatattttaattttttagaaaaattacgaaaatttagcaggaatacgcgccattcctcgtgaatataagttaaagtgaaataattgctaatactttttaaagaaacgaggaggaaacgcggaatggaaatattaaaagttaaagcaacgtcggtccctaattctgtagctggtgcacttgcaggtgttattcgcgaacgcggaacagcagaaattcaagctattggtgctggtgcattgaaccaagctgtaaaggcagtagcaatcgcaagaggatttgtagcgcctagtggtttggacctgatttgtatcccagcgtttacagatattatgattgatggcgaagagcgtacagcaataaaattaattgtagaacctcgttaagtttaaacaacctgtttgcagtatgcaaacaggttgtttttataatggaggaatgaaaatgaaaatttttgatgctcattgtgacgtgcttcttcagttatggagtgcacaagggaaaaggaattttaaagatgattcacaattacatattacatttgaacagttaaagagaagaaaaggaagtatacaatgttttgctatatatgtaccagaaacagtggcatatgaaaaccgatttgaagtagcattacaaatggtagatattttttataatgaaattttatccctacaaggtgtgaagtttattcagacaaaagatgatattaacatattaaaacaggacgagattggagcgatattaacaatagaaggatgcgaaacaattggaaaagatgcaatgaaattacggttgttgtatcgcctaggagtacgttcttttggactaacatggaattatgccaatctcttagctgatggtgcgctagagacacgtggggcgggtttaacgacttttggtaaacatgttgtacaagaactgaatacgttacatgtatggactgatgtgtctcatttgaatgaaagaagtttttgggatgttatagagattgcaaaaaatcctattgcttcccactcaaattgtatgaaactttgcgagcacccacgtaatttaaacgatgaacaacttaaagctcttataaagcgaaatggcatgattggtgtcacttttgtaccgcagtttctaacaaatgaaaaacaagcgaatgtagcagatataataaaacatatcgaatatatttgcttgctaggtggagaaaacaatatagggtttggttcagattttgatgggattgtagatacagttgtaaatgtatcagcgtatcgagattatgaaaatgtaatgaatgagctttgtaaacactatgctgcatctactgtagaacgatttttatatgataattttgtagaacatatgagtttttaaattctgatttaaaattcagaaaaattaaaattaattcatttgattttattgctttttttaagacctaatactagaatgaaaaacaaaatagctttatactaaagattcagggaaatcagaagaggcataatttgcgtccgttgtagtttatttgcataaaaaatgctaaactattactgtaaaaaaatacactacaatgaatgcagccaaaaggggtgtaggagatgattagtcaactttcatggaaagttggaggccaacaaggtgaaggaattgaaagtacaggagaaatcttctgtattgcattaaaccgattaggatattacctatacggttaccgccacttctcatcacgtataaaaggcggccatacaaataataaaattcgtgtaagtacaacagaagtacgagcgatctcagatgatttagatattttaattgcttttgaccaagaaacaatcgattttaatttccacgaactacgtccaggtggaattgtagttgcggatgcgaaatttaatccaacaatacctgacaatacagatgtaaatctatatgtgataccgtttacagatattgcttcagaattaggcacatcattaatgaaaaacatggttgctgttggagcatcaagtgcagtattaggattagatgaaacagcttatttagatgttgttgaagaaatctttggtcgtaaaggagagcaagtcgttcaaaagaatatggacgcaattaaacgcggctctcaatatatgaaagaattactaggtgagaaagtaaacatgatgcagcttgaaaaagctgatggtaaaaaacgcatgtttatgattggaaacgatgcaatcgcatttggtgcggtagctggtggtgctcgttttatgtcagcatacccaatcacacctgcatcagaaattatggaatacttaattaaaaaattaccgaaagtcggcggaacagtaatccaaactgaggatgaaatcgcagcttgtacaatggcaatcggtgcaaactatgctggtgttcgtacattaacggcatctgctggtccaggtctttcattaatgatggaagcaatcggtttagcaggtattacagaaaccccattagtaattgttgatacacaacgtggcggcccaagtacaggattaccaacgaaacaagaacagtctgacttaatggcgatgatttacggtacgcatggtgaaattccaaaaatcgtaatggcgccaagtacagttgaagaagctttctatgacattgtagaagcatttaacttatctgaagaatatcaagttcctgttattttcttaacagatttacagctttcgttaggaaaacaaacagtagaaccacttaaattagataaagtagaaattcgtcgtggtaagcttgatttagaagcagaattaccagaacgtgaaaataaagcatacttcaagcgttatgaagtaacagaagacggcgtttcacctcgtgttttacctggtatgaaaaatggtgttcaccatgttacaggtgtagaacatgatgaaactggaaaaccatcggaatcagcaataaaccgtaaagatcaaatggacaaacgtttccgtaaaatggagaacttgaagtttaatacccctgtttataaaaatgttaagcatgaagaagcagacgtattgcttgttggatttaactcaactcgtggtgcgatcgaagaggcaatgacgcgtttagaacaagagggtatgaaagtaaaccatgctcatgtgcgtttaattcacccgttcccaacagctgaaatcgatccacttgtgaaaaaggcgaagcgtgttgtagtagtagaaaacaatgcaacaggtcagcttgctaacattatgaaaatgaatcttggtaatggtgagaaaatttctagtcttttaaaatatgatggaaacccattcttgccgaaagagatttacaacgaatgcaaaaaaggggttgtattaaatggcaacatttaaggactttcgtaacagtgtaaagccaaactggtgcccaggttgcggagacttctcagtgcaagctgcaattcaacgtgcggcagctaacgttggcctaaatccagatgaacttgctgttatttctggtatcggctgttcaggccgtatttcaggttatattaattcatatggtgtgcatagtattcatggtcgtgcccttccaattgcacaaggtgtgaagatggcaaatcgtgatttaacagttatcgcttcaggtggtgacggtgatggatttgcgattggtatgggtcatacaatccattctattcgtcgtaatatcgacattacgtacatcgtaatggataaccaaatttatggattaacaaaagggcaaacttcaccacgtagtgaagctggatttaaaacgaaaagcacaccacaaggttcaattgaaccatcactaaatgtaatggaaatggccttgacagctggtgcgacatttgtggcgcaaagcttttcgagtgatttaaaagaattaacacaaattattgaggctggtattaaccataaaggattttcattaattaacgtatttagcccatgtgttacttacaataaagtaaatacttacgattggtttaaagagaacttaacgaaactaagcacagtagagggatatgatccatctaatcgcatgatggctatgcaaactttaatggaaaataacggtttagtaacagggttaatttatcaaaatactaagcaaccatcatatcaagaacttgttaaaggctatagtgaagagcctttagtgaaatctgatttaaatatggatcagaaaatgtttgatgagcttgttgctgaatttatgtaatgtaagaagaggaggttgccgatttggcaacctttttttatatacaaaaatatagggtagtcttatttacttggaaaattcagaatgataaaataatatataaatcgttgtatgaaaatggcaagttcattgcttatgaaatgtaagataataaagggcctctttattgttaaaattggcgaaacacgtcgtactatggtaatgtttatagggataaagcaatatgcttttgggtaggacaacaagaaatgataaaaagggaatgtctatttgcgtggggaagacttcattcttatgaatgattagattgattactcaagtttcaaaggacaagttatctctcaagctatctaaccatttttgaggtgagtctaagcgcattaaaatggactatagagtgtgtatagttaagggtgaaaggagattaccgatgaacgagcaacaacgattagcaagtcaacaagcaaattcctctacgaaaaaagaagagaaagattatagtaaatactttgaaagtgtatatcaaccaccttccttaaaggatgcgaaaaagcgtgggaaagaagaagttaaaattgaacgggattttggcttacctgaagagtttcgcaattttggtacaggaagaaagttctatattcgtacatatggttgtcaaatgaatgagcatgatacggaagtaatggcaggtattttcacagcacttggatatgaaccaactttttcaactgaggatgcagatgtagttttattaaacacttgtgcaattcgtgaaaatgctgaaaataaggtgtttggtgagctaggccatttaaagtcactcaaacgaagaaatccagaccttttaattggtgtatgtggttgtatgtctcaagaggaatctgttgtaaataaaattatgcaaaaaaatcagcatgtagatatggtatttggaacgcataatattcatagattaccgtatattctaaaagatgcgatgttctcgaaagagacggtagttgaagtatggtcaaaagaaggtgacgtaattgaaaaccttccgaaagtacgtcgtggtgatattaaagcgtgggtaaatattatgtatggctgtgataaattctgtacgtattgtattgtaccgtatacacgcggaaaagagcgaagtagacgtccagaagatattatccaagagattcgtcatttagctgcaaatggttataaagaaattactttacttggacaaaacgtaaatgcatatggtaaagactttgaagatatagaatacggtcttggcgatttaatggacgaacttcgtaaagttgatattgcccgtattcgttttacaacgagccatccacgtgatttcgatgatcacttaattgaagtgcttggaaaaggtggcaacctagtagaacatatccatttaccagttcaatctggaagtacagatatgctgaaaattatggcacgtaaatattcgcgtgagcattatttagaacttgtaagaaaaattaaagaagcaattccagatgtagtattaacaacagatattatcgttggttttccaaatgaaacagatgagcaatttgaagaaacgatgtcgttatatcgtgaagtagggtttgatactgcctttacatttatttattctcctcgcgaaggtacaccagctgcaaaaatgaaagataatgtaccgatggaagtaaagaaagaacgtcttcagcgcttaaatacactagtaaatacgttggcaattgaaaagaatagtcgttacaaaggtcaaattgtagaagtgttagttgatggggaaagtaaaaataatccggaagtacttgcaggttatactcgtacgaataaacttgtaaacttcgtcgcttcaaaatctttaattggtcagcttgtgaaagtgaaaataacggaagcaaaaacttggtctcttaacggggaattagttgaagagccgattgaggtgaaataatagatgaaagtatattcgaaagatgacattgttgaacaagcgaaagaattagcaaaaatgatttctgaaacagaagaagttgatttttttaagaaagcagaggcgcaaattcataaaaatgaaaatgtaaagcgcgcaatcgatgaaattaaagcactgcaaaaacaagcagtaaacttgcaacattacgggaaatgggaagctttaaaaaaggtagaagctgaaattgatgcattgcaagataagttagacagtattccagtcgtacaacaatttaaatcttcacaaacatacgtaaatgacttattacagttagttgctagtacaatttctaacaacgtaacagatgaaatattaatttcaactggtggcgatgtactaaagggtgaaactggcgcagcggtagaaagtaaaaaaggaaattgtggttgttaaagagatgtcatattgacatctctttttttttgtggattaaacgtaagttcttctcaaaaaaagaatgacacattccgctattgtcacgcatatgattaagtgaatagtgattgaggagggttacgaatgtccgaatttagagagattattacaaaagcagtggttggaaaaggacgtaagtatacaaagtcaacgcatacatgtgaatcgaataatgagccaacaagtattttagggtgctgggtaattaaccactcgtacgaagcaagaaagaatggaaaacatgtggaaattgaaggtttctatgatgtgaacacttggtattcatttgatggaaatacaaagactgaagttgtaacagaacgtgtgaactacacggacgaagtaagtattggttatcgtgataaaaacttttctggtgacgatttagaaattattgctcgtgttattcagccgccaaattgtttagaagcacttgtatcaccaaatggtaataaaattgttgtaactgtagaacgtgaatttgtaacagaagtagttggagaaacgaaaatttgtgtaagtgtaaatcctgaaggctgcgtagaatcagatgatgatttccaaattgctgatgatgaatttgaagaattagatccgaactttatagttgatgcagaagaagagtaatagaaagctagggagaagttcttcctagctttttactttacataagtggggctgaatgaacatgattctttatgaaatatgttataatgaagaaagactcctgaaataggagataagagtgtccgtgaaatgcgacatatatgaaaatagattatcatgtaagaattatggaggaaaagtatgactcaatatacgcctatgatacagcaatatttaaaggttaaggcagattatcaagatgcctttttattttttcgcttaggcgatttttatgaaatgttctttgaggatgctgtaaaagcagctcatgaacttgaaattacattaacgagccgagatggcggtagtagtgaacgtataccaatgtgcggtgtaccgtatcatgcggctaaaaactatattgaacaacttgttgaaaaaggatataaagtagctgtttgtgagcaagtagaagatccgaaaacagctaaaggtgtagtacgtcgtgaagtagtacaattaattacgccaggaacgatgatggaagggcgtacaattgatgagaaagaaaataacttcttagccgcattaacacattttgaagatggatcatatgcattagcttgtaacgacttaacgactggacaaaatacagtaacgttattgactggttcagtagaagatattttattagaagtgtatgcaactggttcgaaagaaattgttgttgattcttcattttctaaagatgaactaaacaagttaactgaaacattgaaaatgacgatttcgtatgaagatgcaacggcaattccggaaggattagaacatcttgtgaaaaatgtttcacaagcaaaattaattaaagcagttggacgtttatttaactatgtaataagaacgcaaaaacgttctttagatcatttgcaaccagtagaaatttattatacgaatcaatttatgaaaattgatgtacattcaaagcgaaatttagaactgacagaaacacttcgaacgaaagaaaaaacaggatcactattatggttattggacaagacgaaaacagctatgggtggtcgtatgttaaaacagtggatggaacgtccacttatacagaaagaaagaattgaagagcgtttagaaatggttgaaacgtttgtaaatgattacttcttacgtgaagatttaaaggaaaagttaaaagaagtatatgatttagaacgcttagcaggaaaagttgcatttggtaacgtaaatgcaagagacttattacaattaagacgttcattgcttcaagtaccagctattttagaagcaattagtttgttagataacgcttatgcatcgagattaattcaaggtgcagatccatgtgaaagcttaacagaattactaggaagaagtattcaagaaaacccaccgctttcgattaaagatggagatattattaaagatggttataatgacaagcttgatcaatatcgttacgttagtaaaaacgggaaaacgtggattgctgagcttgaaaaaagagaacgtgatattaccggaattaaatcgttaaaaatcggatacaaccgtattttcggttactacattgaagtaacgaaagcgaatcttgcagcacttccagaaggtcgctatgagcgtaaacagacgcttgctaatgctgaacgtttcattacagatgaactgaaagaaaaagaaacgttaatcttagaagctgaagaaaaaattgtacagctagaatacgatttatttacagcacttcgtgaagaagtaaaagtatttattccgaaattacaacatttagcgaaagtaattagtgaattagacgtactgcaaagttttgcgacagttagtgaagaagaacagtttgtaaaacctgtactgacaacgaagcgcgaaatctttattaaagatggtcgtcatcctgttgttgaaaaagtattgaacgggaaattgtatgtaccgaatgattgtattatgccagagaatatggatgtctttttaattacagggccgaacatgtctggtaaaagtacgtatatgagacaattagcacttgtaacggttatgtcgcaaatcggttgtttcgtaccagcaacagaagcagtattacctgtatttgaccaaatctttacgagaattggtgcagcggatgatttaatttcaggtcaaagtacatttatggtcgaaatgttagaagcgaaaaatgcaattgcaaacgcatcagaaagaagtttaattttattcgatgaaattggacgcggtacatctacgtatgatggtatggcacttgcacaagcgattattgaacatattcatgaccaaattggtgcaaaaacgttattctctacgcattatcacgaattgacggtgttagaagagagtttaaatcaactgaaaaatgtacacgtttcagcaattgaagagaatggaaaagtagtattccttcataaaattcaagatggagcagctgataaaagttacggaattcacgttgcgcaacttgcggagcttccagatagcctaatcgctcgtgcgaaagaagtgttagcacagctagaaggacaggaagaaattattattccaaaacgagtagaagtgaaagtacaagaagctactccagaacctgtagttgtaaaagaagaaatagcagaaatacaggaaacgaaagtagagactgaagaagaatcgcaactatctttctttggaggagaacagtcttcgaagaaacaagaaaagcctctgctagatcaaaaagaaacagcagtactggcgcaaattaaaaaaatcgatttacttgatatgacacctttagaagcgatgaacgaattgtatcgcttacagaaaaagttaaagaaaggatgagtaagtagatggggaaaattcgcaaactcgatgaccaactctctaacttaattgcggcaggggaagtagtagagcgccctgcttcagtcgtaaaagaacttgtggaaaattctatcgatgcgaatagtacatctattgaaatccacttagaagaagctgggttatcgaaaattcgtatcattgataatggtgatggtattgcagaagaagactgtatcgtcgcttttgaacgccatgcaacgagtaaaattaaagatgaaaacgatctgttccgcataagaacactcggtttccgcggtgaggcattgccaagtattgcctcagttagtgaattggaattaattactagcacaggtgatgcgcctggtacacaccttattattaaaggtggagacattataaagcaagagaagactgcgagccgaaaaggaacagatattacagtacaaaatttattctttaatacaccagcacgtcttaaatatatgaaaaccattcatacagagctcggaaatattacagatatcgtgtatcgtattgcaatgtcacatccagaagtatcgttaaaactatttcataatgaaaagaaattgcttcatacgtcaggtaacggtgatgtaagacaagtacttgcatcgatttacagtattcaagttgcgaagaagcttgttccaattgaagctgaatctttagactttacaattaaaggttatgtaacattaccagaagtaacgagagcatctcgtaattatatgtcaacgattgtaaatggtcgttacgttcgaaactttgtattaatgaaagcaattcagcaaggataccatacattactgccagttggccggtatccaattggtttcttatcgattgaaatggatccaatgctagttgacgttaacgtacatccagcgaaattagaagttcgttttagtaaagaacaagaattgctaaagctgatcgaagaaacattgcaagctgcatttaaaaaaatacagcttattccagatgcaggtgtaacaacgaagaaaaaagaaaaagacgaaagtgtgcaagaacagttccagtttgagcatgcgaagccgaaagaaccatctatgccggacatcgttttaccgactggcatggatgcaaaacaagaagaaccgcaggctgtgaaacagcctgcgcagctttggcaaccaccgaagcaagaatggcaaccaccacagtcgctcgtgagagaagaacaaagttggcaaccatccactaaaccgataatcgaagagccaattcaagaagagaaatcgtgggacagtaatgaagaggactttgaactagaggaattagaagaagaagttcgggaaataaaagagattgagatgaacgggaatgacttaccaccgctttatccaattggacaaatgcatggaacatatattttcgctcaaaatgataaaggattatatatgattgaccagcatgccgcgcaggaacgtattaattatgaatacttccgtgataaagtaggaagagtagcgcaagaagtacaagagttacttgtaccgtaccgtattgatctatctcttactgaatttttacgtgtcgaagagcagttagaagaactaaaaaaagtcgggctatttttagaacaattcggccatcaatcctttatcgtccgctcgcatccaacatggttcccgaaaggacaagaaacagaaatcatcgatgaaatgatggagcaagttgttaaactaaaaaaagttgatattaaaaagttacgtgaagaagcagccatcatgatgagctgtaaagcatctattaaagcgaatcaatatttaacgaacgatcaaatatttgctttactggaagaactacgtacaacaacaaacccgtacacatgcccgcacggaagaccaattcttgtgcatcattctacttatgagttggagaagatgtttaagagggttatgtagagtgaatagattacatttcaaaagggagcaacatttactgttgctcccttttaatatgtagatttaattgtaaacgagaatatggtggagtaattttgtagtgtatttcttggttgcgttaacttaaatttatctatgtataaaaaagcgctgtatacagcactttttaaaaggtgcatgaattgtatcattactaactaaataactatgcatggccaaatgttgcttcttatttagccaattgtcataaggatctatacaattacttatttttattattattaattttttcagtgtatagaacttgctctttatagtgcttcttaattgggaagttatgtgtacctgtgccgttcttgaattttttgtcaatggggttctttagaggaactgttgtagtttcagtaaattcatatgggtaatttattttagatttatcttcaaacatgaaaatgcctccttttaggatctcctaaattctttactataacatgatatgcatatagatattttttggactagttatttatataggttaatggaatttaattacataactaatgaaacattttaaaggaaaacaatttgagaaagaaatggtatgatagatgttggctcctattgttatttttttgtttaacagcacagtgaattgtgcatataaattcattatagattgtttttataatatggtttatatggggttttcctgataatataatgtggaatattatagtgttattaggttattaggaacatctaatgctgtttcataactgaaagggaattgaaaaaaaactgaaacttttctcataaaaattcaatctaacttgaaaaatgaaaggaaaatgaaattttccaaaagatattctttgttaagataaaaagcatacatacaaaaagcattgacatatcttaaaaatttattttcaagatatagtgggggaaaagatgagattagaaaaacaattaataaaaaagatgtattatgaaacgttcctaatggagaatgaaacaaaaccaactcttgacgtacttggacaagcttatgtaaacgaagaaaaaaatgagatttctgatgggtcttatattcgttttgcacaaggtgaattttattatcgtcatcaagattttgaagcagctatttttaaatgggagaaggttagtaatgaattagcaccatgggcacaaaaaaatattgcggatgcttatttcgaacttaatcaattaccatatgctgaaaatatttatacttccattactactgataataaaatattgatgaccgaaattagattacaattactttctctttacattgagcaaaataattttgattcagctttcggtgttattaaagaagcagtttctttaaatcctgattatccgaacgtcacaaaaattgcccgttccttttatgaggaacagcaagattttgatagtgcagtagagcttgctgtgaatgagttaattcgaatagagtcgtatccgtggtttgaggtgttaaaaggatatatcgataaagggtttactaaacatatttcaccagactatttttatgatgcattagctacattaaataatgtagatcaagtacaatttacacaaatggtttcagcactttggaacagttataaagatgaaccaaattatttattatggcttaatacaataaatgaatttttcttacatattgaaatacattcgtccgatatatggaacaaagtttctgctctttacgaagaaacgtactttacattaattcaaggtcaatatacgcttagacaattagacgatatcataccaaatctgttagcaaactggttaaaggtagtcaatccatcttatgctgtatttccatctgcagctgtattggcatgggatgagattttcccttccaaaatagattcagcaaatatagaacatgcggaaaacttactgtcacattctattaatcatgtaaatggcttagagtacagcttacacctttttgaatctattacacagtgggcacaaaagcagaatatagaaataggtcaccgatttaaatggttagttgacgagctcgcagatttaagaacaaatcgtattttagtaacgggaacttcagggaacggaaaaactacatttattaactctatattaggagaaaatatattagaaaaatcaatttcaaatgtagtagttttaaaaaatgatgctcatatagaaataaacgctataacagactcagcaattacaacaacggaagatgtctctgattaccataatatgatgtctcagcaccatcaaacatatagagatagagcgtgtgttgaatttaaattaccatgcagatttttaaatgaaaataaacttacatttgtagtgacacctggctttaatagaaataacgacactagagatgaaatattcgaatatttaaattctgtagacgaattactattcgtattgaatgcggattcaccttttactgataaagaacgtgatattttattaagtattcaagaacatacgccaaatttacaaattcattttttattaaataaaatcgataacatttacagtgaagcagaagtgaaaagggtattacatgatacggcaacgagaataaacacatatttcccgtatgcgagaattttcccttattcctcgttatatacaagtagtcaacaattaaatggtttaactgagtttattcattttaactttaatcataaaaatatcgatgcagaacgtactgaaaagttattatttttcattcgaaaaacaattacatatcttttggataaacgtgttgagaaagaaaataacctggtggatgctattaattggaatgaagatatgctagtgaaactaaacggtagcattaataaccttactgcatttgaaagggaaaaaattcatttcattacacaatcatatcgttcaatgaagactgaaattacaaatgatcttaccgaaaatattccgaagatattaaagagctgttctaatttaattagtgaagaaagtgatttcgggcacatggatacggaactaaataaagcaatgaatgaaagagtgcataaatatttagaacaaactgtattacctaatcttgctctttctatgcaaaattggattgcaacttctaataatgagcttcttcaaagtcaaacgtatttagaagaacttagtgaagggcttaattcactatttggagaaaataaaatacagttagaatgtgactttaaagtgcttgatgactggcgcagagatactgacaggatgacgactagaatacaaatggatgaagtaaatattttacgtcgatttacgccagcacaatttttactaaaaagtgccggtaaattatttggagttcttcctaaaaataaatctatgctatataacaaatataaacagtatgtagaaaatgaagattatactgaagtaacggcttctattatgaagaaatttttcttgcaatttgagctgtttgaaaacacacaagagagggatattcatatattctttaggaatccatttaactccttaaagcaagctgtagaaaatacgcaattagaaatacaagaaaaacaagagatgttacataaaatgaaatcaaatcctgaagtttatcatgattctatcatgctctttgaattgagattgcgtcaatgtgaagtaattttaaatataggtgatgataatacctatacagatgtagctttagaaacaagtgtagaataaaagtaaaagggagcaactgtaataagttgctcctttttcatatagattatttttctgtttctttaattttagtttgtacttcgccagttttaattttattgctttctgagaaacgtaataaatcgccttcaataattttgtcagacattcgtaattcattttgtgcacgtttaatgagggcttgagcttctttttttggtaaatctacaatttcacctgttatacggtcgtagaaagtgttgtttttgtatgcatacttatctgtaacgaagctaccatcacgtaaaacaacaaagccagtatattcatctgaaaacatatcatggccaaaacggatatcattcgtagaatcaacacctaataaatttagaatcgtaggtttcatatcgatttgtcccgtaggctttgaaatagtttgaccttctgtttgtccaggaatatgaatatataaaggtgtacgttgtaaatttaaagtatcaaattctgttatttgatctttttctaaaaactgtgccattgcacgattatgtttttcggaaattccataatgatcaccgtataacacaataatagaattatcgtaaagcccctcggcctttagacgttcaataaattttttaatggattcgtctaagtaacgtgctgttacgatgtaacgatcaaatacgccattaccagagttgtatggttcaatgaattttgtatcttcatcatacgtaaatggataatggtttgttaaagtaaggaaacgagcatagaatggttgattaacagtttttaatatatctactgattgatcaaagtattcgatatcttttaatccccaatttaaatttgtttctggtgtaattttgtaatcaagctcattatagtaacgatcataaccaagagcagagtacatgatattacgattccaaaatgttgcgttattcgcatggaatacagaagtgaaataaccttgctgacgtaaaatttctggagttgcagtataatcattgttaccgtgtgtgaagaatacagctcctcgatttaatggatacaacgacgtatcgattagaaattctgaatcggatgttttcccttgaccagtttgatggaaaaagttatcaaagtaataactttcatttatgaattcatttaggaatggtgtaacttcttgcccgttcactgatgcgcctattaagaaggtctgcaaggattcaagagtgacgacaattacgttttttcctttcgctgcaccaaacatattagggtttggctcgctttgatttgcttttacgtagttttcagtttcttgtaatttactactatcagcaagtgctttttgtgacccagcttttacttgcagtgttaagtcatatacttggtgagtatataagcctaaatttttgacaagcatgactcggtcgaatgatcttgttaataattcagggcgctctttttctgcaagatgtagattcgcaaagaatacaccaatcgttaaaagaaagtataacaagcgcgtagaatgagttacacgttctgttttaaagaccaatgatttcttttttaataaaataaagaagaaaacaatgtctacgaatgcgagtataattttgtagtttaatatttctataatactgccgcctaattggccaaagtttgaggtttgtccaagtactggtaatgtaacgaaatcactataaaaatcatagaacattacatttccaacaagcacgattgttaataagaaattaatacagagcgctatataatttcgcttttcaccagttgcaaataatgctaatccaacaaatgctaatgatgcggctagagggctaataaacaaaatgagctcttgcgttgaagactcgatttttaaatcaaaactgaatcgcgtaataagatatgtttttaaccatactgctaaagccattattataacaaaacttatattttgcatttgtaaatttattttgttcttcatttttacaccttctttatataatttatttaactaaagttatatattatgtttttataactattagactgtaatgaaccatttagactttgttttctaaagggaataatttgaagtattcatatatatacaatggggatttttaaagcgtagtagcataaatataactcttttttgagaaacaggcagaaaaagtcatagttgtagtgaaattgacttatagacatcctaccatattaaacactatgatgatgttacaaaatatcgaacaaataaaagtgaaaatggatagagacttttaaaactgttgacattcaatttattagaattgaatgccaatcgttttaaatatacagttatattacatatgtattttgtaaaatcccgattttttgtcggttaatcattagcagggaaggataggggtcttattaatatacttttactatatataagtaaagtgttttgaaattgaaaatatttgactgatattttaatgatagaaattaaatgtcagataagtactttccaacatacagaccacttgcagctgcttgagataatgaatgcgtaacgcctgaacaatctccaattaaaaatagcccatgtatactagtttcaaaatgattattaatttttatcgtaggagcatagaactttccatcaattccatatagtaaagtatgttgatcgataggctcctgtataaattgttctaagcgtaataaaaattcttttagcccttcaatatatgattgaggaatttcttgattcaaatctccataatccccctgtagtgtaggctgtatacgattatgctccatgctgttttccaccgtaggttgtttctttagtaagtcctctaagcgctgtataacaatccgatctcgtccttggttaatgccttcaataattgaacttgcgtatgcatttgcttctttgagagttggaaaatagcgaggaataaataaagtgaaatttaagttagaagtgccagttccttgttcccgaaaattttgaccgtcaggcataactaaaccttcttcgtactttcgaatgatgcggccttgtggattcatacagtaagtagttgctgtgaaatgctcaccttgataagaaagttttgtttcaaaagtatcttttaatatagaacgtaattgatgttctttcatttctactctaattcctaaatctacacgtgtttgctcctgagaaatatttagggaactgcatatttcttttaaccaatcggccccagagcgcccagttgcaaatacaagttgcttagtttgaactgttccttgatttgtctctattgtaaaatgatcttcctgtttcagaatatgttgtacatctatatgaaattggatctttattttcgtcagtaaaaattcatagagctgctgaaaaatgttactggaaagtgtagtaccaagatgtcttacttctgttgttagcatttgtaaaccacacgcttcagctctcttagtgagacttgaattttcagtagaatattttgaaaccgaacttccaccaaactgacatagaatttcatctacttcagccatgagttgtataaaaccctctttaccgacttttttctcaagttctccgccaaatccgtttgtataattaaatttcccttcagattttcctaaaccaccaaacccgaaatatttatcacatgtagtacaattacacacttttccttcgtctaaaggacaatggcgatcttctagcgctttacctttatcaagaattaaaacttttttgttacttttagctagtgaataagccataaaaatgctacttactccagcgccgataattgtaacatcatacatattcttccacctgctaacgaatagtttgttttttatttttctagtgtataacaattttatgaagttaagaaatagcttttattaataaagtgggagtttttgaacttgatgctttattaatttctacgagtggcggagtaaatacaaaaatttttatttgaaagaagaaatagtttaaaaaataactatgtcatatgattaataacatcttacatagaaaaaaaacagaccttttaagtgaagaggtctgttaatgattttaaatcttatttagcaaacacatgattaccaattactgctactgtctgacgtgtcgtaatccacttgtctgttgatgtttttggattgtagaaataaagccagtcagaatgtactccatttgtggagatagcctcttctacagccatttttgcttctgcgcttgcaggctgattaattcttccatctgtaacaggagtaaatgcatatccgtatttaataggttcataaataacgcctgttattgtatttggaaaaccttttgcatttacacgatttagtataactttcgctactgctacttttcctttataggattcgccacctgcttcagcggtaactaagcgtgccattaagtctttttctttttgtgaaatacttgagttgatttttaaatgttgtcctgtataaagcttgtttccgattgtattgttaatttgttttatagattggacagtgacattgtaacgccttgctatcgtttctaatgaatctcccggttgtacttgataaataatttgtccagaaatgttcgcaggcttggcgttttgaggaacagtgatttcatttgatttcacggaccctggaatatgtaactgttcgccaataaaggtttgatcgtttcctttattattagcctgtttaatggattgtattgaaactccgtattgtttactaatgccccaaagtgtatcgttcttttttactgtatgaatggtagaagcttcagctgtgctttgactacatacgaatgtaattgcagctgcagataaagggattatatgttttagttttagtaatttcattgtaaatcctcctaagaaaaaattaaggtgaaactattaagtaatgtagtttgaaatgtatatatgcgtaatatattaatgtaagtatattagcacatataaaataaataatcactataagtttcatattcgtgtagtgtagagtccgaatatgaaatattgcatatgaaaatacattgaagttcatatttctgattactataatctatttagtagaaagggaatacgttatagaaacgaaatcattatagattaatataatgattaattattaataggaggattaatgcaatggaaatatttcaaaaaatgtgtgcgtcaactgtaatcattacaacacttttaggaacagggggtactatcaatagtgtacatgctgattctatagaacagcagattaaatcagggatagaacaagaaacagataagcaaatcattgtaaaatttaaagcggatttggatttgccatatgaagatggtattgaaaaacaaatacaatctcaaacgaatgataaagtaataaaagatcttttgacagaatatccagatgtaacatttactcgtttattcacatctgtaagcccggaacaaatacaaaaccttgaagtgaaagcacctaatcatgtatctacaagtttattaaactactatattctgcaaaatcaaaatagtgggtatgaagaagaaatagtagataagttaaaggcatcttctttaatagaagatgcgtatatgaagaaacaagagaaaataatgccacctgaagtgcaatcatcaagtgtagctcttaatcctagtaacaatcctagatttaaaaaacaaggttatcttgaagcggccccatacggtattaatgcgcctttcgcctggggaattcaaggcggtaatggaaatggtatcacttttgttgatatggaatacggatggttattaaatcatgaggatttattacatcaaaaaattgagttaatgtctggaagaaatatagatcagcatgtcggtcatgggacgtctgtactaggaattgtatcctctgaggacaatgaagttgggaatattgggattgcgccaaaagcgaaagcaaaggttatctctcaaataagagataatggacagtataatacggctgatgcaatattaagcgctgtaaatcagttagaagctggggatgttttattgttagaggcacaagcatctttcgatggatatggtgataaatatttacctgttgaagtacaaccagatatctttgatgcaattcgtgctggtacagataaagggattgtaattatagaggccggagcaaatgggtggaatgatttagaccagttcaaagatagaaaaggtaagcaagtcttaaatcgtaatagtaaagattttaaagattcgggtgcaattatggtaggagctggctcttcatctttccctcatgaacgtatgtggttttcgaattatggaagccgtattgatgtgtacggatggggagaaaatgtagatacaactacagccgagcaaagtagaagtgctgtaaatctttatacttcaagctttagcggaacatctagtgcttcgccaattattgctggggcagcgactttagtacaaagcattgctaaagaaaatttaggacaaccatatagaccaagtgaactaagagcaatattaagtaaccagagcacaggaacaaaatctaaagatccatatgcagataaaattggtgttttaccagatttgaagtctatactagcaaacttaggctatgaacaaagaaaaccaaacggtgggaatgaattacaagtaacagaaaatgaaccaaataatgagcctagacaggcaaataaagttaactttcatacaccggtgaaaggaacgctacataatagtgatagagtagatgtatttactttccaaattgattcgccggaaaatattaatatttctctactaaatgaacaaaatattggaatgacatgggtacttcatcatgaatcagatttaaataactatgtagcatatggtgaaaatgaaggcaatgtagttaaaggaacttataatgcaaagccaggtaaatattatttatacgtctataaatatgagaataaaaatggttcatacgtattgaacataaaataagtaaaaggaacttcagatgaagttcctttaaatttttctaatttagtatatgtgaatgattttttaactttacttctatgcaatatttcatattgatgaaatgttatttattttttctgagctagcttatattatattcaataagtttgatataaaaacagaaagagagagggataataatgagcaataagaagttaattttgaaattattcatatgtagtacaatatttatcacatttgtatttgctttacatgataagagagtagttgcagctagctctgttaatgagcttgaaaatttgtcaaaatggatgcaacctatacctgataatatcccgttagcacgaatttcaattccaggaacacacgatagtgggacgttcaagttgcaaaatccgattaagcaagtatggggaatgacgcaagaatatgattttcgctatcaaatggaccatggagctcgcatttttgatataagaggacgtttaacagatgataatacgatagttcttcatcatgggccattatatctttacgtaacactgcatgaattcataaatgaagcgaaacaatttttaaaagataacccgagtgaaacaattattatgtctttaaaaaaagagtatgaggatatgaaaggggcagaagattcatttagtagcacgtttgaaaaaaaatattttgttgatcctatttttttaaaaacagaaggaaatataaagcttggagatgctcgtgggaaaattgtactactaaaaagatatagtggtagtaatgaacctggaggatataataatttttattggccagataatgagacgtttaccacaactgtaaaccaaaatgcaaatgtaacagtacaagataaatataaagtgagctatgatgagaaagtaaaatctattaaagatacgatggatgaaacgatgaacaatagcgaggatttaaatcatctatatattaattttacaagcttgtcttctggtggtacagcatggaatagtccatattactatgcttcttatataaatcctgaaattgcaaactatataaaacaaaagaatcctttgagagtgggctgggtaattcaagactacataaatgaaaagtggtcaccattattgtatcaagaagttataagagcgaataagtcattaataaaagaataaagatgatgagagtaagaagcgataaaatatatcgcttctttttcttttccaataaccaacaatataaattgtacttttataatagaaaaaaataaaaacataagatataatcatacatataaaatttgtacctataaattttatatgtatgattgaatttgatttgttgtaatgaaatggaggtatatactatgaagtttccacatgattttttattcggagctgcttcagcttcttatcaagtagaaggtgcatggaatgaagatggaaaaggtgttacgaattgggacgagttttcaaaaattcctggcaaaacatacaatggaacaaatggtgatgtagctgttgatcattatcatcgatataaggaagatgttcgcttaatggctgagatgggattagaatcgtatcgtttttctatttcttgggcgagaatattgccgactggagatggaaaggtaaatgaaaaagggattgaattttataacaacttaattgatgaatgtttaaaatacgggattgtgccgtttgtcactttatatcattgggatttaccattaccgttagaaaaagatggtggatggacgaataaaagaacagcagaggctttcgtaaaatatgcagaaacttgttttaaggcatttggtgacagagttaagcattggattacttttaatgagaccgtaatgttttgtggattaggttatttaaaaggtgcacatccaccaggaatacaaaatgatgttccaaagtattttcaagctactcattatgtattttatgcacacgcgaaaacagttgcggtgtacaagcagctgaaacaatatggtgaaattgggattacacatgttttcttaccagcttatagtgtggatgatcaaaaagaaaatatacaagcagcaaatcatgcgaatgaatatgaaacgtattggtattatgatccaattttaaaaggcgagtatccgtcttatgttgtacaacaattaaaggaaaaaggatggactcctaattggacggttgaagaattagaaatcattaaacaaaatgcagaagaaaatgattttattggcttgaattattatcaaccaatacgagtagaaagatacgatatggatataaagagtgaggaacattctcgagaaaactcaacgcttgctccaggtaactcttcttttgatggtttttatcgaacagttaaaatggatgataaaacatatacaaaatggggatgggaaatatctcccgaaggtttcttagagggattgcatatgttgaaagcacgttacggtgacataaagatgtatgtaacggaaaatggacttggtgatgaagatccgatcattgacggagaaattgtagatgttccgagaattaaatttattgaagcgcatttaaaagtaatgaagcgtgcaattgaagagggaattaacttaaaaggttattatgcatggtcagtgattgatcttttaagttggttaaatggatataaaaagcaatatggctttatttttgtcgatcataatgataacttaaaacgtaagaagaaactttcgtttcattggtataaacgtgtgatcgaaacgagaggggaagagttataacagataaaagagtattttaggagaaagtgtatgagtgcaaagtataaacaaattgcagatgtgttagagcaaaacattcgagatgggctttttaatgaaacgaaaaaactacctacagaagaagcgttgatgaatcgatttgaagtaagccgtaatacgatacgtaaagtaattagtcagcttgtgaatagaggttatatttttcaagtgcaaggtagtggcatgtttttacgcgaaacttctgtaacagattacattaatttaggaagtttacgtggattaacgaaaaatcttgtttcacaaaatattgaaacgaaagtgttagagcttgaagtaatagatgcggacgaagagatagcaaagcagatgcaatgcgaagctggaactaggttgtattttttgaagcgcttaagaattgtagatgctaaaccattctctattgaagtaagttatttcaaaaaggatattattccatatttgaacgaagaaatagcattaagctctgtatacagttatttcattgaagatttacgattaaatattggttttgctgataaagttattagttgtgaaaaagtaaataaagaaaatgcacagtttttagaattaaatgaaggtgatccggcgcttcttattgaaaatacagtgtatcttgtaaatggaacaatttttgagttatctcagtcgatgtttcattatgaaaaggcgaaacttttaaatcgaattaattttaaatgaaaaattattgtgtgaaaaaagcaactggtcctaagtgatcagttgctttttattttttaagtggatgagcaaaaaaacacgaaagtggttggtccgctttttgcaaacatctattatgataagagaagaaaggtagtatgttatcaacgttttaaagaggaaggtttttatgtaagttctttaattaaaatagatgggtcttagagaggtgaaaagacaatgagttttgcaatttcactagtcgttattattgtaattgtatcgctatttgggactgtactagttgcaagaaacgtggaggagaattacggtaagtctacaaaaagaaatgtgaaaaacttatctgcaatctatattcttcttctttttgttctactagttggggtaacatggtatgcggtcatgatctgatagtttgtaaaagaactgaaatgagagtatgaagttggaattttagaagctatcgagtaatcagaaagagaaccattttggatatatccatttacggataagaaaatgtgactaattaatactatttttacggtgaatactgttagtaaaaaatgaggatagttcgttttgaaaggagggaactatatggaatggaaaccaaatcgtgcagataagacacctgtatataaacaaattgctgattatattgaaagaggtatttcttcaggcgaatttccttctgatagtaagttaccttctgagcgtatgttagcaaaggaattacaggtgaaccggagtacaatagtagctgcgtatgaagaattaaaatcacttggagtagtagaacggcaaaagggaagcggaacacgggtgaatacagacatatggggtgtctcacataaacgaataccgaactggggtaggtacgtggaggatggatcgttcttacctaacgtaccactcgttcaacaaattcgaacggaaacacaaaaagatgatttaattaatttagcaagtggtgaactgtcaccagaattaattccaagtgatagatttcgaacaattttgtcggagaaaacatttatggaaaacctcggttatgaccatccacttggaaatgagatgttgagaaaaacaattgcagcacatgttcagcaatataaacaaattgaagcagattcaagctctattcttattacgtcaggagcacaacaggcgcttaatcttatcgttcaatgtttattaaaacctggcgatgcgatcgcgattgaagatccttcgtattgtttttcgcttccaatgtttaaatcggccggtttaaacatatttcatttacctgttgatgagcatggaatgaatccagatgacttaatcgatttgcacaaaaagcatcgcattcgtatggtatttttgaatccagattatcagaatccgacgggtactgtgctttcattagcgagacgtaaaaaaattttagaactgtcttctgagttcggtataccaattgtagaagatgatccgtatagtttaatctcctttaatggagaagtgaacccaacattaaaatcaatggaccaaaatggaaatgttctttatataagttcactatcaaaaattgttgcatcaggattacgtattggatgggtaattggtcctacacgcgtaattgagcgtttagcagatgcaaagcaacaagttgattttggccatagtgtatttacgcagtgggtagcaaatcaatttttagaatcaaaggatttccatacacatattacgatacttcgtggacaattgaagcaaagaagagatgaattaattgcagagcttgaaggaacattgggagaacgagttgaatgtttcgtgccagagggtggaatacatgtatggtgtaaagtaacaggaaagtttgatgaatatcacttattaggtgaatctatacggaatggtgtcgcatttgttccgggcagtgttttaggttcgaaaaatgaatatatacgatttacgtttggtagagcgaatatagaacaaattcaacttggaattaaacggtttgccgacacgctaaatgagatttcataatatggatgtgtgatagtgaaatgagggaaagaaatgaagtacgtgacgcttttacttcaagtaggcgtgctatatgtatttagcctagtgggtacgtggattcaggaaatattccatctatcaataccggggaatttaatagggatgttaatactgttcctgctcctttccactcgcgttttaccgttagaatggtttgagttaggttcggaaaagttaatcgtatttttaccgttatttttaatcccttcgacaacagggctcatggaatacgggtcttttcttttcagtaagggaagtattatattccttttagtagttgcaagtactgtagtaactttgattgtttcagggtatataagtcaattattagtcacatcaaaaaaataaaatcgacaaggtgcacgattcaaatggtcttaattattattactgtagcaatttatttcttggcgacaaagctatataaaaaatttacgtttgcatttacgttaccagtgttaacagttacggcaattatgatttgtttatttttgatttttggtatttctcatcatgagtatagggaaaatgggggaaacattctttcaagcttattgagccctgcaattgtagcattggccatacctctatttaaagagcgaaagatactgatgaaaaatttttcatcgatactaatcggagtagtgataggtatagtggctgtaacgagcatgaatgtagtgattggcggaattttaaatatagataaggaacttatattaactactttaccacaggtagcgacaatgccaattgccctttcaatagcggatcaaattggtggtattccatctatgacttctagttttgtagttgttgcaggaataacaggtgctatgatcggaccaacagtacttaagtttttccgtataacaagtacgattggaaaaggagttggaatgggctgtgcatcacatattatcggtgtgagtcgtttagtgaaagaaggcgagaaagaagcgactatcggttcggtaacgatgattgtaactggaatacttattagtatactaataccgtatggaacgaaatttattttttaaatgtaatggagatgataacaatgacaacatggtttatagttacattatttgtttttggagctattaaagtattagtttctagcatgcccacttctgttgtagaatcaattattagtagatttgaattgcatcaaaagcttgaggcggaaaatacttctatatcgatagatggaaaaaatatagagggagaaatgaaactacaagttattcatgaatttaatgaggcgttgtttttagataaacattatttcccgccgcacggagaagggacaccaatagtcattgatacgaagaaagggagtaaagagattagattttcgctatatagctatgaggaacatgttgatgtcattaagcaatataagaagaaagtcgttgcctatcgtttacgctctaaaagccttcaaacattgacaccattagtaataacggaagagtatgcttaagaagagacctataatggtctctttatttttttatccaattatatacgttccaaataaaagaatgaaaaattatataaccaaataaagaatatgtatggttccaattcgcactatgtacaaataaacctaaactttcagcaatctgttcaaaaaggctagcacaaataccgattgaaataataaatgaaattctagaaactttagataatttttttgaaatgtgtataaagataactgttaaaatcggcagtacgaacaatgtaaaagctatattaaccgaaaatgtggatgagaagggcctagccggaaaggaatatatttgtttatgaacaaaaaaggcatctaagcaagttgcaataatagaagagagaaagattgtaactactaatgctagaaactcattcttcttctcggaggaggacatttttctttgcgagaatggcgatttcaattttttcgagtgttttgcagtagtcttctgtaatttgtccatttatattttcctccttatcaactaagtaatttacaacttgccaatcggtaaaccaatcttcactgtcaacttcttcatgcttcatatctcgccatgcatagatgagtgcagggctgtatatacgataagagccatttcgtaactggcatttcttaattcggcgcttataaaactcacgggaaaaagattcatttacacttgaaaataaatggggccagtaatctttcctagatcctgtatgtggatggtgttgagcccagcttattatttgagataaaacatgtgtatctcgaaataataatgagtacaatctttttccaattaatatccgttcatgtaaggaagtgaaatgtttcattgtatcaccaaatagtaatactttttgtttcttatcattttcgtagaatgggaaaaggatatgattaaactgaaagaaatcaaagagtttaaatccaatactatttagtacagtctttttaaattgtacattttgaattactcttttttctaagtagttttgttcattaataatagttgcaattgctaaagtttttttgttacctgttttccaaaaatggttccacatcgtttccataaatgtagaaacatttaggtgagggagaaggtgaaataacttttgtgatctctttacactttgttcgtaaagtaaaaattgagggtatacatcttggaaaataagccaattccctctttctaaaaaagaaaaaaatatgaattgatctttctctgataaaattctcgtatataaatcgccctttaaatcagtcatattccaaccgccgttacgtgataccatatgcccaagcagtgcccaatgtatttctggatattgaatgtaaaattggtagtatgcgcgtgttcttgtaacattatttttatttagttgttctgtttgtatttttattttgttgatgatgagttgttcttctttcgttaatttatacatggtgtcagaaggaataagtttgcttttttgtttcaattcattttttacgtcgaatagggagagaggcagtgctttggaaggtccgttatatgtatgatttgaattgcttcggtccattccgttacctccctttttcataaatttaaatatgattattggctatgaatcattctatttattttattacgagtataagaaataaatgagcggtgtttttttacaaggaatttatttatcatgcaaacagtataaaaaatcttactgttgtgagatgaaatgaaaaacagaaactacgtttaatagtttctgtttttttattttgtcaattaaatgtaacaaacgacgattatgatttgaatcaattgaaaataattcaataaatattatttaaattgagatgtttcgtaggaggaagaagaatgttaaataaaataattttaattactggtggtacaggttcgtgggggcatgaacttataaaacaactattagaaaaatcaccgaaagaaattagaattttttcaagaaatgaaacggttcagtttgaaatgcagcaacagtttataaatgatgataggttaaaatttattattggagatattcgtgataaagatcaactagtctatgcttgccaaggtgtacattatgtgttccatcttgcagctttaaaacatgttccagtatgtgagtattatccttatgaagctataaaaaccaatatacatggtacgcaaaatgtaattgaagcctctatacagatgcaagttgaaaaagttatatatgtttcaactgataaagcagctgatccatcaaatacgtatgggatgacaaaagcaattggtgaaaaattaatggttcatgcgaatatacaaacgaagaaaacaaaattcatttgtgttcgtggtggaaatgttttaggaacgagtggaagtgtagtaccactttttaaacaacaaattaaaaaatcttcacaagtagggattaccgatgcgaatatgactagatttttcttaacagttgaagatgctgttgggttgttatttaaagccgtatctcaaggtagaggcggggaaatctttgttatgaaaatgccggcatgtaaaataacagatttagcagaagtattaattgaagattccggaaaagaaaatgttaaggtaaaagaggtagggataagaccgggtgaaaaattaagtgaaatgcttctatctgaggtagagagtaaaacaagtataagttttgatcaaaattattttgtggtactaccgactattcctatacaaggacttcaacaatattattcaagctatcctctagtggatgtgaagagttttagttctcaacaagatttacttgcaaaacatgaggtgaaacaaatgctattaaaaggagggtttttgcgatgaaaaaaaatgcgagccttttaataactggtgcaaatggtttcacaggacgccatgcttgccactattttttacagcagggctttcatgtaattcctatgtttcaaaatcgtgcatatggagaaaaaattagaaatggtattacttgtaatttaactaataagagcgaagtaatgaaggtaatgaaacaaataaagccagactacgtattgcatttagcaggaaggaattcggttatagaatcttggacagctgcccttgaatatatagaggttaatgtaataggaacattatatttattagaagcaattaagcaagaagcctcgcattgtagaacattagttataggatctgctttgcaagcagatagtatgaacgaaataaaaatttcaaatccatatagtttaagtaaaacgatgcaagttattattgcagaggcttggggaggattaatggattcaaatattatcattgcaaagccctcaaacttaattggtccaggggaatcgaatggcatttgttcgattctcgcaaagaaaatgatagatatagaatcaggtagaagtaaagccattattgaagtaaacagtttgaaagatagtagagattttctagatgtacgtgatgcgattaaagcgtatcatgtgttattacgagatggaataaatggaaaacaatataatatcggatcaggagtaaaacgatctttgttaaatgtactagaacaatataaagaattaacacagctaaatttttttatagaggaaacagagaaaagtgggagcgactcaaatgagagtttagcaatagaggaaataaaaaggttaggttggatcccagaaattgaatttcatcaatcattaaaagatgtacttgagtatgcgaagtgtagtgacatctgcatgcaatgaaaaacaaaaaagggtgtaaaaaatatatgaatgattatgaaataatagataatcaaaatacgctatttctttcaattgttgatgcgttggattggagagatgaagaagcgcatgtattgcgtctttatgaggcaatacataaatatcaagcgtatgtagaagaaaaaagggttaatcaaataaagtcagcattagagacggaaactagatatgtgattcaaatctttgctcaatacgagtgtagtgagtatggaaatgatttttatgaactcattaaagatcttttacaagatatagaggtggagttaaagatttatataaaaaataataattttatttacatttaaaaggtaaatataaagctagatttttaataataaaggtgggtataagttatgagcaaaacgattctttttactgggggcggtacagccggacacgttatgattaatattgtattaattcctaaatttatagagaaaggctggagagtcgagtatattggatccaaaaatggaattgaaaaatcattagtgcaaaatgttaaatacaatagtgtttcaacgggcaagcttaggagatattgggattgggaaaattttaaagatccttttaaaattatacgaggttgtttacaaagttataaattaattaagaaaacaaagcctgacgttatcttttcagcaggaggatttgtttcagttcctgtagctataggagcatggttaaatcgtgtgcctataattatacgtgaaccagatagcacattaggacttgccaataaaatagcattaccttttgctacaaagctatgcacaacatttcctcagacaggagaaaatgtaagtaatgagaagaaggtttatgtaggaccaattgtaagggaagaaattgagaagggtaacgtattacgaggaagaagatattgtgaatttcagcaagataaaccagtattattaattatgggtgggagtcaaggtgctaagtggataaatgatatggtaagggaatgtttagatacaatactattaaactttaatattattcatatatgtggtaaagggaaggtagacccatctattggcatggaggggtatatgcaatttgaatatataggcgacgagttgccgcatatactaaatatggcaagtgttgtagtttccagagcgggttctactgctatttctgaattgttatttttgaagaaaccgatgttgcttatcccgttaactaacagttccagcaggggagatcaagttttaaatgctgaatatttttcacggcaaggatatgcggaagttatactccaagacagagtaagtacgaatacatttatacatgcagcaaataagttgtatacaaataaggagaaatatattcaaaacatgaatggatataagaaaacaaatgatgagggaattcatcaaataatagatataataaatgaagtggtggagtaatagaaatgtaaatagaaaaacaaaaggaaagaaggtattttctttcctttttactatatttgttcaaattcattattatttattctaattagttatgtactatcggtgaatgccgttttctaatagctcagtaaatgcatgaatatgaataggtttactgtaataataaccttgaataaactgacatttatttttttgaaggaaatttacgtgctctttcgtttctacaccttcagcaatgacagacattcctaatgtatttgctaatgtgatgatcgttttaataatttccattccatcatcacatgtttcagacattgtaataaattctctcgggatttttaacgtatcaattggatacaaaggtaagtaggctagcgaagaataacctgtaccaaaatcgtcgatagaaatgtgaatccctaaactttttagtgtacgcagttttatcaatgtttctcgctcatccatcattgcaattcgctctgttaattcaagatcaagagagcttgctggtaaacctgtatttgttaaagtagaagaaatagactttacaaaatcctcttgttcaaattctttagcagataaatttacacctatttttaaatgtgaatatccgagtgcgtgccaacgtttcatttgcttgcaagcctgctctaatgtccattttcctattgaaataatttgtagtgtttcttctgcaatcggaataaactcgtatggagaaataatacctaattcaggatgattccacctaattaaagcttctgcaccgataattttattagattcactatcaacttgaggttgatacaaaaggaacaattcttcattttgtagtgcgtttggtaaatctttttctaatcgtaatcgtctttcaatttttttagcgattacatcgtcataaatagagacagagttaagctcttttgcttttgcatcatacattgcaacattagcgtttttcagaagtgtagcggtatcgattccggaatgtggataaatagcgatgccgatactcagtgataaagttaatttatgctcatgtatgataaatgactttttcatgcattcaaataattggttacataattggaataagtaatcttcgtcagtatagttttcaattatgattgtaaattcatcgccaccgattcttgaaagatgagtatgtgatggaagacatgattggaatcgctttgctacttcttctaatatgtaatctcctgatgaatgtccaagtgtatcgttaattgctttaaagcgatctaaatctaaatataataatgcaaactcgctttctgctattttagcattttttataactctctttaatttcttatggaaaaaggcacggttcccaattttcgttacagtgtcatggaatgctaaatattttatttcttcttgctgtttttttagtgcagtaatatctttcaccataatatagcttcctgaaatttgtccgtctattataataggaatgattgtaacgtataaaaaataagtaaagccatctttatattgagaactaagttgtaagaatgccgattcttgttgtttcactttttctaatgccaatgctagcttatgcttatcttcatctaaaatgatcgaaaaacaagtttcacctagtaactcatccgttggtgctccaagtagtacactcccagccttatttacatttaagaatattccatttaaatcaatggtgaagatagggtcaggatgatattcatataatgatttaaacttttgctgtttttgagaaagagcctctgatttatgaactaaatcagacgtccgtaaagtaactttttcttctagttgggcattaaatgcctgcaaacgttttgttaaggaattgttttgcatacgtacgatagaatgacgaatgagtacgaaaataaaagtaatacaatttcctgtaatgagagttgaagatgatgtttgttcttttaatgtaaacccgattagtattgcaacagcaagatagggaaatacaactaaagctttttttcctattatagggtttacaaggaaataatttttatgggtattatgatcttctgaaatagagccagctattgcaataagtaatataggtattctatataaaagacgtaataatattatagtttcagttgataagtggttatttaagtaaaaataaatatagttaaaagttgcagaacttattaatacaaaaataaagatataaattttccgtttggaattaaaaattgttggacggaaaaagagactaacacctagcagtagaaataataaatctgcaattgggtataaaaatgaaaggaaaacatctcctagtgaaagagcgaatatatttaaatttggttgattaaataaataccattctaatgtgaatatggaagtaagcactatgcatatatcacaaataaagaacgctttttcccatttattgcattcctttaagattttatagcagaaagcgataagacagaaaaatagaaaaaacatgtaaaatacatcagaaaccgtaaaacgatgtattggaatttcgaagaagctatcttgatatgtatatactatttttcctaataaaaaactaccaattgctattgtaatacatatccaaaacggatttgaactgactttcttagaatatatagagtaaatcagtgatacaaatgtaatggcttcaacgacaagtgaagcgaagcgtacatctgaatttgaaaaatgagtagggaatagatagaaaaacataaaatagattgaatagcatattaatgttccgattaatatacataattgtaaatttttatttaatttcaatgaaatcaccttctttaattatgcactatgttcgttatatctatacataataatattatttaagaattgtatcagatttccttataaaaatcatgtttataaggaaagtgttaaagagtgtgagtattcttaaggttaaaaaaatattgcggttgatagtatagactgtatcaagactttaaatagaaattgtatatttagtcatcctttgaattgtaaagtttttttagtgatttgtaagtggagatgcaaaattgcatataaaatgatgagtatctttttttgtgagatttttatttttaatctgaaaattaacatttgtgaaaatgttgagaaaggatgtaaaataagaacgtgtattcttacagagtggaatagtattgccactaaatagggaggcttttttatgatatatcgaattaaagatgcagaaatatactatgaaattgtgggagagggtaaaccggtcattatcatacatggctgcgcccctgaccataggttaatgatgaaatgtatggaatcagtatttcagaaatatgaaggttataagcgaatatatattgatttacctggaatgggaaaatcgaatgctccaaattggataaatagttcagatcgtatagtagaagtgcttatcacatttattgaggaaatcatttctactgaaaaatttttattggtaggagaatcatatggaggctatttagccaaaggtatacttgcaaagatgtttgagagagttagcggattactattagtatgtcctgttgttgtagcggagccagaaaaaaggattcttccagataaacaggtaattgtacaagatgaggaatttttaaatacgctcacttccacagaaagagaggcattttgtgagttagctgtaatagcaaatgaatatacatataagcgatttaaagaagaaattaagcctgggttagatgttgctaatgatgaatttattgaaaggttgcaaaagaattactctcttactatggattttcagcgtaaaaaatatgaaaatcccgttcttttactgactggaagacaagatatatcagtaggttatcaaaatattatagaaattattgaagaatatccaagggcaacattagcagtgttagatatggcaggacataatttgcaaattgagcagcctgaattatttgagagtttagtaggagaatggattagacgaacaaatcagcacagtttataaagtattgtagtattacgcctaagtgttgaaatgggataaatgaacgtgatttattaacttatctcgctattttcctgtaaaagcccgattagtaagggctaattaaagtttcactttataaaaaattttaaggagaaattatgagcacatatatttatatggttagacatggtgaatcaccaaaactagaaggaaatgaaagaatgcgcgggttaactgagaggggacatatggatgcccgtagagtaactgacatattaaaagcggagaggattgatacttttatttcaagtccttataatcgggctgtgctaacgatagaggagtcagctaatttccatgaaaaagaaatagtagtatatgaaaatcttaaagagtgtatgttttcaagtgaggatcaggttatatcagacaaagaggtgtatccacttgtacagaagatgttctctaatccggactttgcacgaacggaaggagagtcatatgcagattgccagagaagagtagtgaaagtattaaaagaaatcttaatggattttcaaggatggaaaattgtaattggtacacatgggcttgtcatgacattaatgatgaactattttgataaacaatatggttttgaatttttaatgaatacgtcaaaaccggatatatataagatggagtttaaagaagaacaattaatgaatgtagagagattatggaaagaggaataaaattagttgcatggattttgttgtaaaagttacttttatagcaaagtcttttttttgaatagaaagcatctttatcaactatttttagaatgttaaataaataagtaattattcagtctttgaataaattatggagaaattggtttagggaaacaattttaaatgtgtcaaaactccaaacgttggatttatattcaataggagaaaaagatgtagaattttgtcttacagtccccgtttacttttcatttcattacatataggctttgtggtgtaagggggacattgcctttacacaaaatctataaggaggtcattgtaatgaaacagattaaaaagtttgcgggagttgctttagcggggacgattggattaagtggactactgtttttagaaccaagtgtaagcgttgcggaagcacagcaagtgagagtggaaaatttcaatacaattgatgtaacgatgaatctaaatgaattgtatgtattaagtggcagaagtattgatattctttctggagataaagaagcaattcagttaaataaatacacaattagttttaataaacctgggaagtatgtgattaaagtaaatggctgtatttatgatgatgtatatacttttattgtaaatgagtagtatatattcttaaattgcgagataaaaacagaaacaccctatttacggtgagagtcgtaaatagggtggatttatttgtattaatctgcactttaaatatgttcactaattttctttttgttatgtaaagtatgtaaaagtgttaacaatgtaaatgaaatatacatcttcacattcaaaaaagttaaaatatttcgttttaaggattataatggagggagaaacataaaagggagtgaatgaacttgaaacaagaacttattgaaagatttacgagatatgtaaaaattgatacgcaatcaaatgaagaaagccatacagtaccaacaacaccaggacaaattgagtttggtaagttattagtggaagagctaaaagaaattggtttaacagaagtaacgatggatgataatggttatgtaatggcaacacttccagctaatacggacaaggatgttcctgtaattggatttttagcccatttagatacagcaacagactttacagggaaaaacgtcaaaccacaaattcatgaaaattttgatggtaatgcaattacgttaaatgaagagctaaatgttgtgttaacaccagagcagttcccggaattaccatcatataaaggacataccattattacaactgatggtacaacacttctaggagcagatgataaagctggtcttacagaaattatggttgcaatgaaccatttaatacataatccgcaaattaagcacgggaaaataagagtagcatttacaccggatgaagaaattggtcgtgggccagcgcattttgatgtagaagcgtttggtgcatcattcgcttatacgatggatggaggtccattaggtggtttagagtatgaaagttttaatgctgcaggtgctaagttaacgtttaacggaacgaatacacatcctggaacagcgaaaaataaaatgcgcaatgctactaaactggctatggagtttaacgggtatttaccagtagaagaggcgccagaatatacagaaggctatgaaggattctatcatttactttctttaaatggtgatgttgagcaaagtaaagcgtattatattattcgagactttgatcgtgaaaattttgaggcgcgtaaaaataacgttaaaaatattgtgaagactatgcaagaaaagtatggcgaagatgcagtcgttttagaaatgaatgatcaatactataacatgcttgaaaaaattgaaccggtgagagaaattgttgatattgcatatgaagcaatgaaaagtttagacattgaaccaaatattcatccgattcgcggaggcacagatggatcacaattatcatatatgggattaccgacgccgaatattttcactggtggtgaaaactatcacggtaaatttgaatatgtttcggtagatactatggaaaaagccgttcaagttattgtggaaattgcaagacgttttgaggagcaagcttaaaaaagaaccaagtagtacgaatgtgctacttggtttttttaatatagtactcgccacaaataaaaagtcgcataagactcccaattagcccagtttgccgcgaaaccttttatttcatttttagtcggtttattttcggaacctgttataaatttaattgcattatgcagaccaacatcatcaattggaaaagctgaaggaaatcttaaacaacgcattaaaacatagttggcagtccatggtcctataccatggatagcggttaattgtttctcagcaacctttacatcttgtgtttgcagtaaatcctcttttgatagttttctctctgtaataagcttcgcaataccgattaaatattcacattttctagtcgtcatttttaattgttggagatcttctacatgtagatttgcaattgtttcaggtgatgggaatatccaatgctttctaccgtcccattctacataactgccaaattgctcaactaatcttctttttagcgtataagcatatgttaagttaatttgttgaccgataattccccaggaaagtgcctcaaataagtctggaatacctaaattacgaaggccataatattgttcaattggtccttgaaggagtaaatcatgtttagctaatgtataaaagggagctaaatcagtagttaaatcaaaccattcttttacatagttagctacagcttcacgtatcgatttttcagatgtatatgattcttctaaacaacgtatttgaatattgccatctgtattcacactaatttcaactaaaggatttacatcttgaacagggataactttataaattttgttatcttcaatatgaaacatacattcattgttagaacgtgatagataacgtaaattttcttggaaacaaaattcttttggaactgctatagataatgcgctattatattctgctgtcatatgaattccacctgtaacttttctaatgtaagcaattttttcttcatttctaatccacccctaaatccggttagtttcccattcttcccaataacgcggtgacaaggaatagtaataaggagagggttagcagcaatagcagaagcaacggcgcgcacagctttaggtttttgaattctttcagcaatttctgtataagaatatgtctttccataaggaatttcacgtaccgtattccaaacagataattgaaaattagttccataagcatcgataggaaatgtaaaagtttctcgcttgttttctaaatactcgataacttcttgcgtatatatttgcaagtaatctggactatgaatcaatatatgttggggcagtttttttctagcccatatatttaattcttcaaagttttcgtcttgtgatccaatgaaacatagtccattttcagttgcagcaatatgaaatcgccaatttttatgtgtaagtagcgtccaatatatataattatttttgtaggaattcattatcgtatccctctttcatctcgttcttttttcgatattcagtaggagtaaagccggttttctttttaaataaagttgcgaaatactctgggttttctatcccgacagcagtactaatttctttaatagattgatttgtgtgtaaaaggtatttggttgctttaagaatcctgaattgttgtatatattctataggagttagccctattattcttttgaaagtacgttgtaaatgaaaagggctaccgtgacacattcccgcaagcatgtcgagagttaaggatttgtcataatgcttttcgatatagtctttaatttgttctacccactcttcattaggtaaagtgatcccatttggcttacaacgtttgcacgggcgaaagttttcacttaatgcttgctctgcatgatgaaaaattcgtacattgtttctatttggtattcttgatttgcatgatggcctgcaaaagattccagttgatttcacagcataaaagaatttgctatcataggaagaatcgttatgaataattgcttgccaatactcatttgttaatgtaactccttcattgtgcaaagaacatcacctctgaaattagtataacctgaataaagtgcgtatgtatgtattcataaatgtaagagcaagattacaaaggtgaaaatatcggatggcgtttagattattttgttgtttcggaaagaatgaaagaccagatgacagaagcgaaaattaatagtgaagtgatgggatcagaccattgtccagttgaattacatataaatttctaaaaaaagaagtatctccctaatattagggagatacttctttttttaattcagtttgttaaaatttttcaaatcattcttgaaataatttcatattaaatatatacttagtaacgataatcattatcagtgaaaatgattatcaagtgatgaagacgtaaaagaattatagtctaggggaagtgaacgtgaatgagttctggataaaattattaatctaatgaaatatatatatggaataagattcatatagttaaattctattgagaatatagtttgaaaatttgagaggagacatataaagatgaacaagaaattatttactttagggatggttaccgttttaagtgtaggtttagcggcatgtaatagtgcggataaaacttcaggcgagcaaaaacaacagacaaaagctacggaaacgaaaaaagatgaaaaacgaaaaattacatatttaggtaaagaatatacagtgccagcaaaagtagataaaattgcgacagctagtttagagtcaatggaagatgcggcagtacttggaattaaaccagttggtgccattactgtaggtggtaaactaccaaaatacctggaaaaagagttagaaggtgcgaaatctgttggtgagaaaatgcaacccaatttcgaaacattactacaattaaaaccagatgtgattacatcaagtacgaaattcccagcagaaacagctgaaaagtttacgaaagtagctcctacattcccggtatcacacgtttcaacaaattgggaagataacttaaagttaatgggagaattaactggtaaaaaagataaagcagaaaaaattattaaagactacaattcagacgctgaaaaagcaaaagcaaaactaggagataagttaaaagataaaaaagtacttgtcattagactaagagcaaacgaattattcctatatccagaaggagtatacttcaaccctgtaatttataaagatcttggactaactgctccagaacaattgaaaactgtaaaagcacaagagaaaatttcatttgaaaaacttgctgaacttaacccagattatattttcttacaatatgaggcaagtgaaaataaaaatccaaaagtgttagaagaaattgaaagtaatccaatttggcaaagtatgaatgctgcgaaggaaaagaaagtatttgtaaacgttgtagatccaatggcgcaaggtggtactgcttggagtaaaactgccttcttaaaagaagcagtgaaaaatttatctaaataatacaataagtaaggtgcgttgaatgatatgcagaaaacaaatgcagtaccagtaactatattatgtatagcacccatactcatcttatttacagttatactttcgattttgtatggggcgaaaagtattgatgctgaaacagtgtggaacgcattatttcattttgattcaagtgatgtaaatcataatattattattacttcacgtttaccaagggtagttgcagctcttttagtcggagcatttctagccatatcaggagcacttatgcaggggatgacaagaaactatcttgcatccccttctattatgggtgtgacggatggtgctgcctttgttattacactttgtataatttttcttccaggaatgtcatcaattggtatggttatatgttcaatgattggttctgcactcggagccggtatcgtgtttggttttggttcgctccttcaaaatggcttatcaccagttaggttagcgattataggaacagttattggaacatttttaagcagtgtatcggctgcaatggcttcgtatttccaaatttctcaaaatgttagtttttggtttaatgcaaagttagatcaagtagatcctaatataattaaaatcacgataccgtttgggataattggaataattttagcattgttaatatcaaaatctattaccattctttcattaggcgaagaggtttctattaatttaggacagcgtacaaaactagttaaagcgatggcaattttatcggtaatttttttaacaggaacagcagttgctttagtggggaaagttggttttgtaggtttaattattccacacattacccgctttataattggggtagattataagtggattttgccatgtgcaggtgttattggtggcgttttcttagcgttatgtgacgttttgagtagatttgtaaactatccatttgaaacacctattggagtcgttacctccttaattggaattcctttcttcctttatttaatccgtactagaggaggagagagacatgcttaaaagttcaagtcaacgtttcggaatgacgatggggattattatatttttaatactatgtgctatctatattagtttaacaaatggtacgttcgacattacgattacagatgtatttaaaacactttttagaattgatccagtaccagaacatgatttagttatttttgagtttcgtcttccgcgtatcgtaattgctggattagtaggattaggccttggtgttgcaggtgctgttattcaagggattacgagaaatggattggcggacccaggtattttaggagtaaatgccggagcgggaacagcgattgtcatttttatgtttttctttcaaggacaattaaaaagcacagactgggtttctattatgatgatgccaatgtttggtttagtaggtggattaggtgcagctatcatcatttatctgttttcttggaaaaacggtaaattagattcgcagcgacttttattaacagggattgcaattggatcgggatttggagctttttctatgtacttatcactcaaaatgaagtcaactgatttcgagatggctgcagtgtgggtgtctggaagcatatatagtgcgaactggaagtatattgtggctatgttaccatggcttattatcttaattccacttatacaaaagaaagcttatttattagatttattccaattggaagaaacgagtattacaagtttaggtgtttcagtagaaagagagaaatcgattttattattaagcagtatcgggcttgtgagtgcatgtgttgctgtttcagggagtatcggttttattggcttaatggcaccgcatatagcgaaaagacttgtcggtattcaacataagtatataattcctacgtgcggcgtaatcggaatgtttcttgtaattgcctcagactttattgcaaaaacagttttcacacctgtagagttaccagttggaatcgttatttctattgtcggtgtaccgtatttcttatatttactttataaggcgaaagcgtaagaggaggaataaaagtgagtattttaagtgcaaaaaatttagaaacaagttatgaaaagcttacagtgtttcgcgatttaaatgtggaaatacaagaaggaaaagtaacgacaattataggtccaaacggttgcggtaaatcgacattgttaaaaacaatgggaagaattttaaaacaaaaaagcggaaaagtatatttgcaagggcaagatttacatacaatttcaacgaaagaaattgcgaagcagttagctttactcccgcaaactccaattgcaccaggtgaacttaaagtggaagaattaatttcttatggacgctatccacatcgaaataacgtaaataagttaacgacaaaagataaagaaatgattgattgggcattaaatataacgaaaacttctgaatttcgaacgagacaaattgcaaatttatcaggtggtcaaagacaaaaggtatggctagcgatggcattagcacaagagacagaagtgttgctattagatgagccaactacataccttgatatgtctcatcaattagatgtattacaaattgtggagaagttaaataaagaacataattgtacggttgttatggtattacatgatatcaaccatgcagcaagattttcagatgaaattattgcaatgaaggaaggagaaattgttacaactggtagcccagaagaaatcattacaaatgaagtattaaaagaagtatttcatattgatgcacgtgtcatgattgatccgtataacggggctcctgtttgtttcggttatgatagcgttgtatctcaagaagaaaaaatcgaaatatatgtaacaagttaaaaagggggggatagggtgaatactacagttgaaaaacagcagattataatatctaatacagaacagtggaaaatgtattcaaaattagaaggtaaggaatatcaaattcatatttcaaagccgaggcaaccagcaccggattcaggatatcctgtcatttacgtattagatggcaatgccttttttcaaacatttcatgaagcagttaaaatacaatcagtaagagcggaaaaaactggtgtttcaccagctgttatagtaggagtgggttatccaattgaaggcgcattttcaggggaagaaagatgttatgattttacgcctagcgtaatttcaaaagatgcccctttaaaaccagacggtaaaccgtggcctaaaacaggaggagcacataatttctttacttttattgaagaagaactgaaaccacaaattgaaaagaattttgagattgataaaggtaagcaaacgttatttgggcattctttaggtggattatttgctctccatatactatttacaaacttaaatgcttttcaaaattattttattagtagtccatctatatggtggaataataaatccgtacttgaaaaagaagagaaccttataaatgaattaaacaatgctaagtttgaaacaggagtgttccttacagttgggtcactagaacgagagcatatggttgtaggtgcaaatgaattatcagagcgccttctccaagtaaaccacgataaacttaaatttaagttttatgaagctgaaggggagaatcatgcatctgttgtgccgacgtctttaagtaaagggttgagatttattagttacatataggaaaaaaggttatggatgaaacattccataaccttttttgatatgtagaattgtcctttttgaaagttttgtttcaacttttcgtctaaagagacaaaaagttgtcacaaaacggtcacaattagcataaacataaaatagacgaaatgaacttatttccaaaaaggctcggtttattccgatcatgatttgtagagctgaaaaagtatggattaaaagttcactatattcccaaggaggtagatcgtatgaaaactattcttgctatcgctggacttatttgggttctatcgcatggcatcccaatttatgaaggagaacaaattcgcagtgctctgaataaaaattttaatgaatatcatatcattgaccggcaagataatgttgtaacagttcgagtaaatgactgttttcatacggtaaccgttgaaggaacttcagtagtgaatgatacaaaagtatgtgatcaacaataattatatatggaaagaaaaaattcttggattaaatatctgaaaattaagattttaatattatagatgaagaataagcgggggcgggtaatccccgcttattcttgtttcactttattgaattttgatgagagatataatgatttttttgacaaaaaggaaagggtatactaaaaattgagattaagaagctaatgcattgttaagaataatcataaagcgtaaatatactcttatggggtatcgtgcgtagatatttaatgctataattggtatactcataaaaacaattgttttattgggtgaagagaaactttaagaaggtgataatatggatcataaagagcatgaagcagtaacacatagatcagaaaaagaaaaagaacagattataaatagattaaagagaattgaaggacaggtccgcggtattcaaaatatgattgaaaatgatcgttattgcgtggatattttagtgcaaatttcagcgattaatgcagcgatgaaaaaagtaggaatgggtgtattaaaaaaccatacaagtcattgtgtttcaggtgctattaaagatggcaatggtgacgaagcaattgaagaattaatgactgtatttgaacgtttttcaaaagcgtaaaaacaagctagtatgtcactggcttgttttttttgtttaccttcataataagatctcggcgtattgatgtgaaaaagtgtgtgtaaaataaacttttagaaaataattgaaaaatcatgatataaaaccattgattaccttaggggggtatggtaagatgtaattgtgattaacaaacaatgaataaacaagaggaggattttaaatggaacagttaacattacaggttgaaggtatgtcttgtggacattgtgtaaatgctatcgaaagcagtgtgaaagagctaaacggtgttgaacaagtgaaggttcaattagcagaaggaactgttgaagttactatcgactcgtctgccgtaacattaaaagatatcgttgctgtaatcgaagaccaaggatacgatgttcaataattatttttagatatggaaataaatcgtactttaaatgaagtacgatttattttgctaataattatacctcataagggtatatagaggtgagagacatgaatgaaaaaaaagaggccaatcttcaaatatcaggaatgacatgtgtggcatgtgcaaatagaattgaaaaaggtctaaaaaaagtagaaggtgttcatgaggcgaatgtaaattttgcacttgaaaaaacaaaaataatgtacgatccaactaaaacaaatccgcaacagtttaaagaaaaagttgaatcgttaggatatggaattgtaagtgataaagctgaatttactgtttcaggaatgacatgtgcagcatgtgcaaatagagttgaaaagcgcttaaataagttagatggtgtgaacaaagcgacagtaaattttgctttagaatcagctacagtagactttaatcctgatgaagttaatgtaaatgaaatgaagagtgcgattacgaagctaggatataaattagaagtgaaaccagataatcaagatgcatcaactgatcatcgattacaagaaattgaaagacaaaagaagaagtttattatttcgtttattttatctttcccattattgtgggcaatggttagtcatttctcatttacgtcgtttatttatttaccggatatgttaatgagcccttgggtgcaactagcacttgcaacccctgttcaatttatcattggtggacagttttatgttggagcttataaagcgttacgtaataaaagtgcgaatatggatgttctcgtggcacttggaacgtcggccgcgtatttctatagtgtatatttaagtattcaatctattggttcttcgaaacatatgacagatttatattttgaaacgagtgcggtacttattacattaattattttaggtaaattatttgaagcgaaagcaaaagggcgctcatcagaagcaattaaaaaattgatgggtttacaagcgaagacagctacagttgtgcgagatggaacagaaataaaaattttgattgaagaagtagtagctggtgatatcgtctatgtaaagcctggtgaaaaaataccagtagatggtgagattgtagaaggaaagtcagcaattgatgaatcgatgttaacgggtgaaagtattcctgttgataagtcaattggggatgtagtaataggttcgacaataaataaaaatggatttttaaaagtgaaagcaactaaagtaggaagagatactgcattagctcaaattattaaagtagtagaagaggcacaaggttcaaaagctcctattcaaagggtagcagatcaaatttcaggtattttcgtaccggttgtagttgtgattgcgattatcacatttgcagtatggatgatatttgttacacctggtgattttggcggagcacttgagaaaatgatagcagtacttgttatcgcttgtccatgtgcattaggtcttgcaacgcctacatctattatggcaggatcaggaagatcagcagagtatggtattttatttaaaggtggagagcatttagaagcaacgcaccgattagatacggttattttagataaaacgggtacagtgacaaatgggaagccggtgttaacagatgtaattgtagcagatggattcaatgaaaatgaactgcttagattagtaggggcagcagaaagaaattctgaacatccacttgcagaagcgattgtagaaggaattaaagaaaagaaaattgatatcccaagttcagaaacgtttgaagcgattccgggatttggtatcgaatcagttgtagaaggaaaacacttattaattggtacacgtcgattaatgaagaaattcaatattgatattgaagaagtttctaaatcaatggaagcgcaagaacgagaaggaaaaacagcaatgcttattgcaatcgataaagaatatgctggtatagttgccgttgcagatactgtaaaagatacttcaaaagcagctatcgcaagactgaaaaaaatgggtctagacgttgtgatgattacaggagataatacacaaactgctcaggcaattgcaaagcaagttggtattgatcacgtaattgcagaagtattgccagaaggaaaagcagaagaagtgaaaaaactgcaagcaaatggtaagaaagtagcgatggttggagacgggataaatgatgctcctgctcttgctacagcgaacattggtatggcaattggaacgggaacggatgtagcgatggaagcagcggatataacgttaatccgcggtgacttaaatagtattgctgatgcgatctttatgagtaaaatgacgataagaaatattaaacaaaatttattctgggcattagcttataacgcgttaggaattccaattgcggcattaggtttcttagccccttgggttgctggagcagcgatggcatttagttctgtatccgttgtattaaatgcattacgattacaaagagttaaattaaaatcttaaagagctacattaagtaattgaatagaattaaaaaacaatactttgaataagtattgttttttttgttcgtatagaaattaaaacgatataataaagtagaaatatagaatcgtatgtagtagaaaagttaagaggtagtttcgtaaggagacttatatatgttaaaagatattataattagaacattccagaaagaagatttagatcaagtattacaattgttctatgaaacagttcatacggttaatgcaaaagattataatgagttacagctacaggcgtgggcaccggagcaactagatagagaaaattggttacagtctttagaaaagaatattagctatgtagcggatcataaaggtgtgattgtggggtttggggattataacgatgatcgttacgtagatcgtttatttacgcataaagattatcaagggaaaagagtcgcttcatacatactacagaagttagaaaaagaagcagtgaacctagggcatagggagatatatacagaggcgagcattaccgcaaaacctttttttgaaagtaaaggttttatttgcataaaagaacaaaagaaacaacataatggtcagatttttattaattatgttatgaaaaaaatatccttctcataaatgagaaggatatttttcattattttacagcttcttttagttctttaccagctttgaaagcaggtactttagaagctgcgatttgcatttcttcaccagtttgtgggttacggcctgtacgagcagctctttcacgaacttcgaatgtaccgaatccgataagttgtactttttcaccagcagctaaagtgttagtgattgattctactacagtttgtacaactacagtagcttctttttgagaaatctcagcattttgtgctacgtttttaattaattctgttttgttcatgtttttcacctcatatgtaaataatgctatttaagttgttattataacgtataaaacattcgagaacaagtgtacgtacatatattcgcaaaaaaaatgaaatttgtaatattttttagggcactttatagacattccatttaagcggacagagatttgttcttcatttcagtcttctcttgatgagcaggtagtttcttattataagatatgaagtaaggtagtgctacaaataacatacctcctactaaatttccaaagaaaacaaaaataaagtttggaaaatattcagcccaagtgaaatgaccggcaaaaatggcggctgggatgacaaacatattggctacaacgtgttgaaatccaatcgcaacaaaagtcataaccgggaaccaaataccgataatctttccgataaattctttacttcccatactgagccaaacagctaaacaaacgagccaattacatccgattgcagaaataaatgcttgcaatggtgtatcttgtagtttcgcttgagcgatagaaatagtttttgctaaaaaagctccttcagttaagccaacgatatgaccgaaaaagtaggctacaaatacagcccctatgaaattgctaaatgtaacaataactaaatttcgtatgaaataaaataaagtaattttcttttgaagccaggccatagaaactgtcatcatgttaccagttactagttcaccgcctgcaagaataacgagaataaggccaatagggaatacagcagcgcctagaaaactagtaaatgatccccaagcctttggcattgttccaataacatgaatatcgagtaaataccctaatgctataaaagcaccgccaaaaaaaccgagaattaacatagggagtaatgataaatgagctttttttcttccggaattagcagcaagttccgtaatttcttctggtgtaaatacagacatgaataacccctccgtaataaaatgatggaatgaatagaaaaaatttcgaaaatctatgtattataaaaatatgttatgacttctgtataaaattgtcaaagtgaatagagagggaattacatattgataacattgttcatgttgtcacatgaatgtaacaataaggatttaaagtgtttctagaggtgaaaacatgaatacgaatcatgtaaaaaaagaacgaaaaaaatcaatcgtaaagatatttattattagttttataagtatattaatgataccagtaagtttgtattattatgcgacagaaatagaacgaaaactagtaacagttacgtggaatgaaatagaagcttctacaattcctaaagagtttaataataaaaaaatattgcagttttcagatgtacatttaggaccagagtttacactgaaacaacttgaacatttagtggagaagatgaatgaattacatccagatatagtagtttttaccggagatttaatagataaatttgggtcttatagtgcggaaagagaagaagcgaaggttattttgcagaaaatttacgctcccttagggaaatatgctgtgtttgggaatcatgataggggcgggggcggtagtttattttacaaaaaatatatggaagaagctggtttttctgtattagtaaatgaagtgcagaaaattaaagtggaaaacggcaaatatattataatatcaggtttggatgattttctattagggaagccgcaaatagattcaactttaaaaaacttgaaacaaaatgatttcaacatgttattagtacatgagccggatgttgtaaccaaaataaatcgttacccagttgatcttcaactgtcaggacatagtcacggaggacaagtccaaattccttttgtaggtccgttaattactaccaaactagctgagcactacgttgaaggtatgtatgaagtagaggggaagagtaagccgttatatttatatgtaaatcgtggcattgggactactaggatgcctgttagattttgtagtgtacctgagctttcaatttttgtgttgaagcaaaatagtaactagaatatttaacaatatgattccaaggaacgtgcgatgttggtcgatggaaaagagtttcttaaaactttagatgtgacaaagtaattttcataagtaaaaaacaacaataggacctataaagggacctattgttgtttttatcctgcattgattgcccataaatgtccgattgatgagggctaattatagttttactttgttatttttgcaaggaaagaccatcaaaatatgttctatagttactagagaattcaaagttgttttttgcatcccaattaatagaccaagacattaggccgcggaatgcaggatagccactctggttagaaagtttatactttcctccgaatggaactcctttaatgatataatttaaagcttttttcatttcagttggcgaaatgtatccaccacttggagctgccgctggtgctgctggaagcccaatcatgacttgatctgaacgaagagctgggaaaatgttatttgcattaccacctacaggaaaaccatgtaagagcatatctgccatagcgacctcgtagtctgcagtaccttgattgtagttattaccgtccattccaatcccgctaccagcgttgtagtgttgaacgtgaatgtatgttagtttatctttcactccataaataattggtaaatatgcaccccatatgcttccatatgcgctatatccgccttgaacataagctgtttcaggggccatgcttaatagaaaatctggaccataatgatctgagattgttcgaatagctgaaataagatttacgatttgaggggtagttgggtttttgaagttagtgtcatttccgtttaagtaaatacctgattcaaggtcaatatctattccgtcaaaaccgtatttatcgatcagagattgtatggaattaataaaacgatccttagcggcattgtcaggaagtaaaacgaccccattttgtccacctattgaaagaactattttctttcctttactttttaaataagaaatatctgatttgaattctgcatctgtaccatacacaggagaaaattcaacagtggaacgatcaccaccagtttcaccaaaagatacattgattacatcccattttggtgaaacgtcttttaatttaataatgccagtaccgttatcaaaattatgccagtatccaacgagtaattttgaacctaaattgtttgctgcttgtgcttggaaaggggataacggtagaagtaagaacattactaaaatacaacaaaaaaatttgaacttgtttaacatatcaacactcctatacaaaaagttgtctagatgtataatcttgtttatttaataatatctgaaaattctttcttttgtaaagggactataattttctcaacaattgtgtatgggaaagtattaaacctaatgtaataatttttgaaggaggttgaattttaattgttgaattcagaatattttgatatattttaaagtataggacaaaatctttcgcacagtactcttacataaatttcaaaatttagtttggaaggggatgtacaagatttggataaaaatctaaagaaagacctcaaaatacgccacattacaatgatttcaattggcggtgtaataggggctggtttgtttgttggaagtggtgcagttgtacattcggcaggaccaggttctatcgtttcatatgcattagcaggacttctagtcattttcgtcatgagaatgctaggagaaatggcagctgttaatccgacaagtggttcatttgcaacgtatgcaagagaagcgattggtccttgggcgggttatacaataggctggttatactggtttttttgggtaattgttattgcaatagaagccacagcaggtgctggtattatccaatattggattccacaaataccgctttggttattaagtttaatattaacaattttattaacgctgacgaacgttttttcggtgaaatcatttggagagtttgaatattggttttcttttattaaagtaataagtattgttttgttcctttgtctaggtcttgctgttattttaggatttgttccaggaacagaagcacccggcacttcgaatttaattggacaaggtggatttatgccaaacggtataagttcggtactgcttggaattactgtcgttatattttcatttatgggatcagaaattgtagcggtagccgcaggtgaatctgcagaacctgtaaaagcagtaaaaacagcaacaaacagtgtgatttggcgtattcttgtattttttattgggtctatagcggtagttgttacgctactgccatggaattcagcaaacatattaaaaagtccatttgtagctgtattggaacatataggaataccagctgcggcacaaattatgaattttatcgttttaacagctgtactctcttgtttaaattcgggtttatatacaaactcaagaatgcttttttcgatggcagaaagaggagatgctccaaaggcgtttttgaaattgaacagtagtggtgttccagttcgggccgttttatttggaactttcttcgcttatattggcgttgtgtttagttacatttctccagataaagtctttttgtttttagtgaatgcatctggcgggattgcgttactagtttatctcgttattgcagtttcgcatttaaagatgcgtaaaaaaatggggaaagtggaacaacaaaatttgaaagtgaaaatgtggctttttccgtatgtaacgtatgttacaattgttgctattatagcagttttagttgcgatgttcgcaattgatactttacgttcacaagcacttttaacaatgtttgttactgttcttatcatactttcttattttatttttaatagaaataaaaatagcacagttttgaatcctaaaagtaagaatgaggaatctgttcgattctaattttcgaagagagttacacccagtcattgctataaaagaatcatatataatcatagaaacaagtaattactattgtcatagtggatataaacttttttcttgactttttatacgaaggcgagcaaaatggtaaaaaaggaaggggggggatgataatggaagagtacgtattagagctgtataacctgttatatacgacagaatggcaagatattgtttcgtttctaggaatcgtattttgcatgaaaattgtaattgtatatatggaagagcaaggtatgttctattccttctcatccccgttcgatatgcagcgcgagccgttgctaaactatgccaatgtgaattacgaacaaattccttttgttattttctttatgattcgatttattacagcaattgtaaggaaaaaggaaagtgacgatgaagagtgccactcaacttgtaatatagcgaatgttttttaagctaaatacaaggaggagatttatatgtggtttcgatttcttatgattggtttcttttcattaacagcaatttctttaatgggatatcaagtgtctgaaatttttcaagcatatagcgatacattttttaacaaaaactaatcgcgttgctatttgaataataaagcgataaaatccttcttaagaagttttattaagaaggattttttctttgtcttatcttgctgtgtcaaactattgtcacatttacactgtgaatagtatgttaaaatagtgaggttacgtatacatatttgaaggaagagggagtgaccattttggtggatcaatcaacaaatcagaaaagctatgctcctattgtgataacgctttctgtaattgtaaatgcgattattttatttttgttctttggacctgttggctatgaaggagaattacattttgatgtaacaattttaccaatgttaaatgcaatttttaatagctttacgttcgtattcttattagcagctctatactctattattaagaagaatgtgaaaatgcaccgtggtttcatcctggcagcatttacaacgacgttgctattttgtgtttcttatttatcttatcattacttagcgccagcaacacattttggcggagaaggattcattaaatatgtgtatttcatcattttaattacacatattatcctggcggcaattattgtaccgcttgcattgtttgcacttgtatttggttttacaaatcaattaacacgtcatcgtaaaattgtacgttggacgatgccgatttggttatatgtaagtttatctggtgttattgtttacttaatgatctcaccttattaccaataaaaaatctcagcctgtaggctgggatttttttattaagcaaatatttttgtgaaatgaaaaaaatatggtatacaaaagtatagttgcttttcatatagaagggatggtaaaggaatatgcaaaattttgtatttcgtaatccaacgaaacttattttcggtaaaggtcaattagagcagttaaaaactgaaattccacagttcggtaaaaaagttcttctcgtatacgggggaggcagcattaaaagaaacggtatttatgataatgtaatttctattttaaaggatataaatgcagaagtatttgaattgacaggtgttgaaccgaatccacgtgtatcaactgtaaagaaagggattcaaatttgtaaagaaaatggtgttgaatttattttagcagttggtggaggaagtgtgatcgactgtacgaaggcaattgcagctggtagtaagtacgatggagatgtatgggatattgtaacgaaaaaaacatttgctaatgaggcattaccatttggtactgtacttactcttgcagcaacaggatctgaaatgaatgcaggctcggtaattacaaactgggaaacgaatgaaaagtatggatggggtagcccggttactttcccgcagttttcaattttagatccagttcatactacttctgtaccgaaagatcaaacaatttacggtatggtagatattatgtcgcacgtattagaacaatatttccatcatggaacgaatacagaactacaagatcgttattgtgaagctgttttaaaaacagtaattgagacagcacctaagcttttaagtgatttagaaaattatgagcatagagaaactattttatattgtggtactatggcgttaaacggcattttagcgatgggagtaaaaggagattgggcgactcataatattgagcatgcagtttctgctgttcatgatataccacacgggggtggccttgcgattttattcccgaactggatgaaacatgttgtagaggaaaatgtaagtcgttttaaacagttcgctattcgtgtatttgatatagaaacagatggcaaaacagataaagaagtggctttagaaggaattaaggcgctgcgtcaattttggacttcaattgaagcgccagcaacattagctgattacggtattggagaaaatgaaattgatataatggctaataaagcgatggcgtatggtgaatttggtaactttaaaaaattaaataaagatgatgttttaagtatatataaagcttctttataagtgaatttagaaaagaaacctatttgattgtttaatcgaataggtttctttttactgtttataaatgtttatgggtgttttttgattatttttgattgtttgtggttgatttttgtgaccgttttcattatactgtaatcaaagaagaggtgaataaaatgttaactcctgaacgtcatcaaatgatattgcaacttgtaaaagaacagaaagttgtaaaattacagcaattagttgaaagaacagaaagctctgagtcgacaattcgccgtgatttagcacaattggaaaagcaaaggttattaaaaagagttcatggtggtgccgctgttttaacaggaaaagggcaagaaccaacgatggttgaaaaatcatccaaaaacattcaaataaaacaacaaattgctaattatgcggctagcgttattgaacaaggtgattgtatttatttagatgcaggaagtacaacatttgaaatgattccatttttaataaataaagatgtgactgtcgttacgaatggacttatgcatattgaagctttagttgaaaataatattcgtgcgtatttactaggtggaatgatgaagagtaggacgaaagctttaatcggtgctatggcacaggaaagtatgcagaagtatcgttttgataaatgttttttaggtgcaaatggtgtacatgaacagcttggctttacaacgccagatccagaagaagcgctcttaaaacaaatggcattaacattagcaaacgaaggatatttcttaattgatgaaagtaagttttcagaagttgcatttgcgaaaattgcaaatgttgaagaagcaaatattattacaaaccatttagaaattgatttagaaaaatataaaagacaaaccaatgtaattgaggctgataaacaatgatctatacagttactttaaacccatctattgattatgtagtacaagttaattcctttgatttaggcgcagtcaatcgagcagagaaagatatgaagtttcctggaggaaaagggattaatgtttctcgcgttctccatcgtttaggtgtggaaaatatagcacttggatttactggtggattcaccggtcaatttattaaaggtgtattacaggcggaaggcgtaatgacaaacttcatccaagtagacggagattcccgaattaatgtgaaaataaaaggacaagaagagacagaattaaatgggcaaggtcctaatgtgacaaatgagcaatttgaacaattaatgaaacaaatcgaaagtatgaagcagggagattgcgttgtgctagctggaagtgtacctgcatctatcccaactaccttttatgaatcaatcgcagcgctcggagctgaaaaaggtattcgagtagtagtcgatgcgagtggaagtgcactgcagcatgtaattaaaaataagccatttttaattaagccaaaccatcatgaacttggtgagttgtttggagtggagctttcaacagtagaggacgttttaccttatggaagaaaattaattgaacaaggtataaaacacgttatcgtatcgatggctgaagagggagctttattatttacggcagaaggtatatatgaagcgactgttccaaaaggtgttgtaattaattcagttggggccggagattctcttgttgcagggtttgtaggcaaatatgaacagacaaaagatattgaaaaggcatttcaatacggcgttgcaacagggagtgcaacagcattttcagctgatttatgtaagaaggaaaaagtagaagaattattgtcgcaagtaattgtagctaagcgatagggggaagcaacatatgaaaattacagaactattaaaaagagatacagtcattatggatttgacagcttcaaataaagaagctgtcatagatgaattagttgagaaattaaatggggcaaatcgtttaaatagtaaaatggaatttaaagaagctattttaaagcgggagtcccaaagtacgactggaataggggaaggtattgcaatacctcatgcgaagacaaaggctgttaaacaaccatcgatttgttttggtagaagtgtaagcggtatcaattatgagtcgcttgacggacagccagcacacttattctttatgattgctgcaagtgaaggagcgaataatactcatttagaaacgttgtctcgtttatcgacattattaatggatgaagggtttcgcaagcaactattagaagcaaaggatgaaagtgagcttcttcaactatttgatgaaaaagagaatgaaaaagaagaagagattgaagtcgccaaaccagaaggaaatgaaccgtacgtattggcagttacggcttgcccaactggaatcgctcacacgtatatggccgcagatagcttgaaagcaaaagcagcagagctaggaatcgcaattaaagttgaaacgaacggatcaacaggtataaaaaacggtttaacaaaagaagacattgaacgagcaacagctattattgttgcggcggataaacaagtagaaatgaatcgttttgctggtaaacatgtcattcaagtaccagtcgctgatgggattagaaaaacggaaacacttcttaatcgagctgtaaagcaagatgcaccaatctttaaaggtgtaaaagaagatggaaaggcagaaagtacggaaaaagaaaaaggattaggaatttataagcatttaatgaatggcgtaagtaatatgcttccgttcgttgttggcggcgggattttaatagcgctagcgttttcgtttggtggtataaaggcggaaggtcctttagctgaattgttcatgtcaattggtggaggaaaaacaggtgcgtttttattccttgtaccaattttagctggatttattgcaagttctattgctgatcgtcctggttttatgcctggtgttgtaggtggatttttagcggcgaatgcgaatgctggctttttaggtggattaattgctggtttcttagctggatatgttgttttagggttgaaaagattattttcaggactaccagtacaattagaaggaattaaacctgttttgttatatccagtctttggattattgattacaggagttgtaatgcaaaaagcagtgattccgcctgtagtagcattaaatgaaatgttgacagggtggttaaatggtttaaacggtacgaatgctatattactaggtcttattttaggtggtatgatggcaattgatatgggtggtccaattaataaagcggcgtttacgtttggtattgctgcaatagaagcacagaattttggagtgcactcagcagttatggctggtggtatggtaccgccacttgcgattgcatttgcaactacattctttaaatcaaagtttacagaagcggaacgtaaatctggtttaacaaattatattatgggagcatcgttcattacagaaggtgcgattccgtttgcagctgcagatccggttcgagtaatcgtaagttgtgttgttggttcaagtattgcaggtgcgttatctatgttattccaaattacattaccagcaccgcatggtggattatttgtaatagcgttagtaaataaaccgttactatatattttctctatattaattggaacgattgtctcggccattatgctaggtgtttggaaaaagaaagttcaataacaaataaaaagagagcagcttttagtagctgctctctttttattacaaaaaaataggttaacaattaaatattgatgttttttggtaaaagatgtaacgaattgtgaattttttgtaacaaaaaagtaacactgtaattttttctggaaaaaagttcttgtgctcgtatatgaaaaatatatgaaaaccactggagattgtatgagaaatacattttattaatatggaaatttatgttacaactcgttaatcgtatattacgaatgctttgtaattgtgtgatttctaaaaattctaaaaatctgttgctataatgaaaatacgaaaacaaagcaaatggaggctattcatgaaaaaattattaggtatagcaacagcagcagtttttggtcttgggatttttgcgggttctgctaaagcggaaacaattgtaacaacagacgtattaaatgttagagaaaacccaaatgtagagtcaaagcttgtaggtaaagtgttaagtgggaatacactagatgttataaatacagaaaatggatggacaaaaattaagttgaacggtaaggaagcgtttgtaagtgccgattttacaaagagcacatattatgtaacggcgggcgtattaaatgttcgtgctggagcgaatactgattctgaaattttaggtaaacttaataaaaatgatgtgattgaaacgacgaatcaagttcaaaatgaatggttacaattcgactacaatggaaaagttggatatgttcacgtgccatttttaacaggaacagcacctgtaatcgaaaagaaagaggttgtagctcaagaagaagcgccagctagaacaaatacgccggttaaaaataatacagtagttaagaataaagagtctgttaagagtaacgattctattaagaatgtagaatcaagtaaacctgtggtaaaagaaaaaccggctgcaaaaccagttgcaaaatctactgaaacaagtgcgcctactggtggtcgtgaaattacagtagaagcgacggcatatacagcagatccgagtgagaatggttcgtatggtggtcgtgtattaactgcaatggggcatgatttaacagcaaatccaaatatgaaagtaattgctgttgatccgaaagtaattccgcttggatcaaaagtatgggtagaaggatatggagaagcgattgctggagacactggtggtgcgattaaaggaaatcgtattgatgtattagtcggttcagatggtagtgctaatagctgggggcgtaaatctgtaaaagtgaaagttatacaataggttatcgatattaatataaaaagcggttgcttgaaattatgtaagcagccgctttttatggattattgaaatggataaatagttttacctgtaataattttatatgcactgcaaaattgcgtttgtatatattctgtatttttattttctggatgtaatgttgtttcatggagggtagaatgaaaagcccgtagtaaacaatttagggcgaagtataattcctcttgtgaacaattttgttcttttatagaagtagctaaaatgaggtcttttgtcaaagatgaaaaattgatggtggattgtttcatagttaactcatcctctcgaaactatttttatcatgtatatgcagaattggacaaactatgttcttttttctgtgtaatttcatgtaccgaaatgaaagaacttgcaatcatgccgttaaaattggtaagattgggtataatcaatagatggagtatattacataaagagagttgaataatatgggagaagtgcaacgtgaaaaagttgctgtcatcattggaccaactgctgttggaaagacgaagttaagtatcgatcttgccaaagcgttgaacggtgaaattattagtggtgattccatgcagatctatcgaacgatggatattggaactgcaaaggtaacaaaagcagagatggacggaattccacattatatgatcgatataaaaaatccggaagattcattttctgtcgcggaatttcaagaacgtgttcgcaagcatattcgagaaattacagaacgtggtaaattaccaattatagttggtgggaccggtctttatatacaatctgttttattcgattatcagtttacagatgatgctggtgatgtgatataccgagagcaaatggaaaagttagctttagaacgcggtgtggaatatgtacataaaaaattgcaagaagtagatccagaaagtgcggagcgtattcacgcaaataatgtacgacgtgtcattcgggcgttagaaattttccacacgtcgggtgaaaaaatgagtgaacaaattgagaaacaagaaaaagagttactctatgatgtttcattaattggcttgacaatggatcgagaaatgctatacgatcgcattaacttacgagtggatttgatgatggaacaaggcctattagaggaagtagaagggctgtataatagagggatacgagattgtcaatctattcaagcgattggatataaagaaatctatgattattttgagaatcgagtttctttagaagatgcggtatcacaattaaagacgaattcgcgtcgttatgcaaagcgtcaattaacgtggttccgtaataaaatggatgtcacgtggtttgatgttacaaacggtgaaaaaacgtcagaaattttacgatacatagaaggaaagttacaagtaaagtcgaataatagtaagtagagaaaaagaggaggattcgacatgaagcaatcaatcaatattcaagatcagtttttaaatcaactccgtaaagaaaatacgtttgttacgctgtacttattaaatggtttccagcttcgtggactaattaaaggatttgataattttacagtcctgctggaaacagaaggtaagcaacagcttatttataaacatgcaatttctacatttgtaccacaaaaaaatgtttcaattgaattagaatagtaatgaattattgtacataacaaaaaagagcgagtttcctcgctctttttttatttgtcataaacaatatatagtgaaatttaagcgattctaaatacagtaaggcggatgttagtatttcctgttgcagggatcgtaatctcattaagtgtagattggacagagattcttgcaccagctgctaatgtttctattgtagtaaatgaaagtgagtcgcctattaaatttgaagagaaattatcagttgcgactgctccattaattgaaattcctactccgagtggagcgcatcctggcgcagttgtagaaatggatacgctaattacataaataccaccgttaataacagtaactgtatctgtgccgttgaagataatattgtttacgttaattgcagtactaaaaataaaattattaaattgcagtactgtttgctgaatattgtttgttacaacaattgttgctatagggaagctaggtccagtaggcccagtaggtccggtaggtccaccagaaggtccagtaggtccagtaactcctatgccagtagcgccggtagcacccgttggtccttgaatgccttgaggcccggtagcgcctgtgttaccttgaacaccttgaggtccagtggcaccagtagcgccttttacaggtctctcatgaaagtaaaaaaattaagtttaaacatactatacgaggagtggaagaaatggaaaagaaaacaatgggaatccatcatattacagcgattgtagggcatccacaagaaaatgtagacttttatgctggtgtattggggttacgtttagtgaaacaaacagtgaattttgatgatccaggtacgtaccatctttattttggaaatgaaggaggaaagcctggaacaattattacgtttttcccatgggcaggtgctcgtcaaggtattattggagatggtcaagtaggaattacgtcttacgttgtaccaaaaggtgcaatggagttttgggaaaatagattagaaaaattcgatgtttcgtatacaaaaatgactcgttttggagagcagtatttagaatttgatgatccgcatggtttgcatatagaattagttgaaagagaaaaaggcgaattaaataattggagttttggagaagttacaccagaagtagcaattaaagggtttggaggtgctgttcttttatctacacagcctcaaaaaacagctgaattgttagaacatattatgggtcttgagaaaattggagaagagggtgaatttgttcgattccgttcttctgctgacattggaaatattattgatttgaaattatcaacaatcggtcgtggccaaatgggcgttggcacagttcatcatattgcctggagagcgagtgacgatgctgatcagctagactggaaagagcatgtgtcgcgttttggatatcacgtaactcctgtacaagatcgaaattattttaacgcgatttattttagagaacatggtgaaatcttatttgaaattgcaacagatcctcctggtttcgctcatgatgaatcgttagagacgatgggtgaggaattaaagttaccggaacaatatgaacaacatagaaaacagattgaacaaacgcttttaccatttgaagtgagaaatttagattaaagtgattgaagggggaaaaggattatgatgaaacatgtttttcaaaaaggaaaagatacgtcaaaaccagtgttgttattacttcatggcacaggtggtaatgaattagatttactaccacttgcagaaatagttgatccggaagcgtcggtattaagcgttaggggaaatgtgttagagaatgggatgccgcgtttcttccgccgattagcagagggcatttttgatgaagaggatttaattttccgtacgaaggaattaaatgaatttttagatgaagcggctaaagaatataaattcgatagaaataacattgtagctatcggttattcgaatggggcaaatatcgcagcaagcttattattccattacgaaaatgcattgaaaggtgctgtgcttcatcacccaatggtaccaagaagaggaatgcaattagcaaatttagcagggaaatctgtgtttattgctgctgggacaaatgacccaatttgttcatcagcagagtcagaggaattgaagatactattagaaaatgcaaacgcgaatgtaacaatgcattgggaaaatcgagggcatcaattaacgatgggtgaagtagaaaaagcaaaagagtggtatgacaaagtattttaaaaaagaagcatctgctaaccattagcagatgcttcttttttatttaggactggattgcaagatgagatgaagaaagtggtagctcaatatcaacaattgtacctttatttaattcgcttgaaatgtgtaatttaccatgatgttcttcaattattttgtaacacatcattaatcctagtcctgtgcctttttcttttaaactataaaaaggttcgcctagacgggagatacgatcttctggaatgccacaaccttcatcgataattcgtattaagatgaaattatcctctaatggttttgtttggatgaaaatatttccgccatttggcatcgcttctatcgcattttttaatatgtttataaaaacttgttttaattggttaccgtcacattgaatatcatatacgtaatcaaaatgatccatgatgatatgaacgctatgcataattgcagtcggtaaaataaatgtaactacctcttcaattaaagtttgtatgttacaagtttggatagataatacttgtggcttagacatcgccataaattgactcgtgatggattccatttgtgaaatctcacttaacataacatcgatataccatttttgctcctcatttatttcagggaggagcaatgttagaaaaccctttagggaagtgagtggatttcgaatttcatgggcaattccagctgtcagttgtccgactactgcgagcttctcagattttcgtagtaacttttcagtttcttttagctctgtaacatctctccccatcacgataagacctttgcgagaaccattaggatgataaagcggaacttttgatatacttaagattaaatcgaaatcatctctatgtataataaattcctcgccatgaagaatttgtctttgttgccatgctagttcatcgacttcttcacaatgtaaaaaagcttctcggtatgcttcattatattgaatgagttcgctatcttttttcccgtggtaaggtacatgatggaagttgaagcaagaaagtgcgtagtcatttgcctcaagccagcgcccttcatgatctttaaatataacaaacgcaggcatggagtttactaatgtacgtaatctcttcttactttcttttagcatattctcaattctttctgatttttcaagtggcttcataatagcgtatacaccagtaagacgattttgaacaaaaataggaactagttttgtcacaacatctaataagaatccatttttatgataaatagataagatatactcttgttgattatccgcttcagtattctttatattttgtaatacttgctcagaaatatgggctcctaaaatagaggtaatatttttctgttctaattctaaagaagtgtaacctaatattctttcggcagaaggatttatatgtagaataactccttctaagtttaatgaaataatactatcaggattatgttcgaacagagatgcgtacatttctgttaatgaacgatcttgtatatggtttcgcaaacgtctagaaatgttcggatgacgttttttttgagttggtgaatattttttacgactcataatagttcctccgtacaaatagcatctaaaaagatttgtctattcataactataatatagatgtgatgtgtatttctataaaaaatggaagttatagaataaattttatttttttattttttttgcaaagtgaatgcaggatggtaataaggggagcttatattgttttataacccttttgtaagttacagacggctgttttccgtataacattagggtagaggagggggagagaaaatgaaaaattatattcaagggattgatcacgtgcaagtagctgcacctgtagagtgtgaagaagaggcgcgtgatttttatgggaataaaattggtatggtagaaattccaaagccagaagagttgaaaaaacgaggtggatgttggtttaaatgtggaaatcaagaaatccatattggtgtcgagcggaactttacaccagctaaaaaggctcatccagctttttatgtgaatgaagttaatgaatttaagcaaacacttatagagaaaggtgtaaaagtgattgatgattatgcacggccagatgtaattcgattttacgtatcagacccgtttggaaacagaattgaatttatgcaaaataaagactaggtgtattcccacctagtctttaacttcttctgaaaagtcctaacacttctacagtttctgtaatattaacgaatgcattcgggtcaatttcagaaattgtaagtttcatacttgctaattcttcacgagaaacgaccgtcataagtacacgctttttctcgcttgaataagcgccttcgccatcaagtaacgttattccacgtacaacagttgaaagaagctgttttttcattttttctgcttcatttgttacaatcataagtgtaactttacgatgttttgtatgaacagcatcaattactttaccagttacataaattgaaagtaagcttgtaagtgcaacatcccaggtgaagaagaatcctgcgattattacaacgactgcatttaaaataataaggaatccgccaagtttaatgtctcgcttgcgggataaaagcataccgataatatcaaatccaccagtggatccattacagttaaaaacaagaccaataccagctccggcgatgacacccccgaagatagaagataacaatggatctgttgctacgacttttactggaacgtagtataatgcaacagataatacaactacagagacaactgtgttaaaaatcactttttttccaaggcctatgtaccctaaaataaggataggtaagtttaatacaaagttaataatgcctgtgtttacaggggttacaatccctaaaataatagcaattccgccaattccactacttaaaattttgtgggggataaggaaaagattaaaggcaaccgcaataataatagaaccgataataacaccaaggaatctgaccatttctttcccgtccttcactgaaaaattcatattatttcaagattatatatgatattgaaagttttgggtaaaaacagtttattttggtaaattagattaatcgaaagaatttgagtattttatcatttgaaaggggatacagttgtgaagataaaaacatatcaacagaaaagcccgttgaagcaagaatgtgaggattcttatttttgtaataaagataaaaagatttatggtgtatgtgacggtgcaacaccacttgtcccgtttcgtgatgaaaatggacataatggagcatacatcgcttcgcatttatttgcaaattattttactgcattacgagagaatcatagtttacaatttgcagttaccaaagcaaatgaagcattacaaagcaaaatgttagaatatgaagtagacacgagaaaaaaagagcatttgtggtgcacatgtatcgcggcagttcaaatagttggtgagaaaattgaatatgcgcagcttggggactgtatgattgtcgcaacttttcaaaatggaacgatgcaagtattaacgaaagacacagttgaaggaattagtaaacgagcaaaaaggaagagggaagaagatcgtaaaaaagggttatctgtaccagaagaatatgtttttcaagatgtgcgagaacagttaaaatacaatcgttatcttgcaaatatgccaaatggttattcagttgcaaatggaatgaaagaagcgatacattatttacaacatggtgaattacatatagatgaagtgagtggaatttttatttgttcagacgggttattccacccagattggtcattagaacaaactgttgcatatataagaaagaatagtataaacgaatatgtagcaatcattgaaaagctggaaggggaaaagagaataaaaccagatgataaaacgattattatgattgatttttaagaggaggcagttcaaatggaaattaaatatgtcaatctaacatttcaagatgaattagttcctttagaaaaagtaaatcaactgattatccaccatacagctgaagatggatgggacgtgtataaaacgcatgaatttcatcaaactgtaagagggtggagcgggattggttacaactattttatcgaaaaggacggaactgtagtggaagggcgaggtttacatattggagcgcacgcgaaagaccataaccgtcatacaattggaatatgtatgacgggaaatttcgataaatacgatccaactcctgcacaagtgaatgcattatattctttatgcaaaatgtttatgaagcaatttgctataaagaaagaaaatatactaggtcatagagagttagaaggagttacaaaaagctgtcctggtaatcgtttttctatggtagagttaaggaagatattatcttaaatatagaggagtaacaacgatgatgaatataaaaataccaaatgataaaaaagaagagcttgtagcgcaaattcagcaatttttcgttgaagaagatttagatgaaattggacgtttccaagcagagcgtttaatagaagaaatggttaaattagttggaccatttgcatacaatcaagcaattggagatgcaagaaagcttgtaagtgagaaattaacgaatatcgaagaagatttatacgtgttagagaagaatgaaggaaaataaaaaaagagcccatcggctctttttttatttgattgatagcaaaaaaacatagggaaaacacggaaaagacattgaaaatacaccttttatttttagaatattcttagttttaaaatacttcagaaaggaagattgtaatgagattaacgccaagagaaattgataaactgctagtagttgttgcggctgatttagcttatcgacgaaaggagagggggcttaagttaaactatccagaaagtatcgctattattacgtatgaaattttggaaggagcaagagatggtaaaaatgtagcggaattaatggaacttggaaaaaacattttaagtgctgaagatgttatggatggtattgcagacatgatatcagatattcaagttgaggcaacttttcctgatggaacaaaattagtaactattcatcagccaattcattaaaggaagtgaatgttatgattccagggcaatatatccttgcgaaagaagacatagtgtgtaatggaaataaaaaagcaatgaaagtcaaagtaataaatcagggagatagacccattcaaattggatctcattaccacttttatgaagtgaatgaggcattaaaattcaatcgcagtgtagcaattggacaacatttaaatattccagcaggtacagcggtaagatttgagcctggagatgaaaaaacgattgaactagttccatattcaggggaacaagaagtatatggatttaaaaataaagtggatggcgatattcaatcttacacaaaaagagggagatagcatgagttttaagatgtcacgtaaacaatatgctgatttatatggtccaactacaggagattctattcgtttagcggatacacaattattcgcacatgttgatcgaaatgccactgtatatggtgatgaagctgtctttggtggaggaaaatcaattagggatggtatgggacaaaattcacaacttacaagagaacagggggttgtggatgttgttattacgaatgcaattattattgattatacgggagtatataaagcggatattggtataaaagatgggaagatttcagcaattggtaagagtggtaatccttcagttatggataatattgatatcatcattggaacatcaacggaagtaatttctggtgagcggaaaatcgttacagctggaggtattgatacacatgtgcatttcatatccccacaacaaattgatacggcattggcttcaggtataacaactttaattggtgggggaacaggaccggcagaagggactaaggcaactacaataacacctggatcttggaatttaagaaaaatgctagaagcagcagaagcttttcctataaatcttggatttttagggaaaggaaatagttcaagtttacctgccctggaagaacaaatatttgcaggggctatcggattgaaaatccatgaagattggggagcaacttcgtcagcaattaatcactcgttacagattgctgataaatatgatattcaagtcgctattcatacggatacgttaaacgaatgtggttttgtggaagaaacgataaaagctattgataatcgtgttattcatacgtaccacactgaaggagctggaggtgggcatgcaccagatattataaagattgctgcgctgaataatattttaccatcatcaacgaacccgaccttgccatatacagtgaatacgctggatgaacatttagatatgctcatggtatgtcatcatttaaaagcgaatattccagaagatgtaatgtttgcagattcaaggattcgaaaagaaacaatcgcggcagaggatattttgcaagatttaggggttttcagcatgattagctctgactcacaggcgatgggaagggttggagaggttattattcgcaattggcaaaccgccgataaaatgaaaaagcagattggtagtttagagggagataaagaatataacgataataatagaattcaacgttatatagctaagtatacaattaatccagctattacacatgggatttcagaatacgtgggctctattgaaataggaaagtatgcagaccttgtaatatgggatccacaatttttcggtgttaagccagatatggttttgaaaagcggaatggtagtgatggcattaatgggagacgagaatgcttcaattcctaccccacaaccatattatgaaaaaaagatgtttggtgcatatggaaaagcagtacagtcaagttcgattacatttgtatcgaaagtagcttatgagaataatattaaagaaaaattgggtttaaataaagttgtattacctgttaaaaatacgagagagatttcgaagcaagatatgaagttaaataatgcaacaccagaaattgaagtagatccgcagacatatgaagttaaagttgatggacaagtaatcacgtgtgaagcagtagatgtactacctatggctcaaagatattttttattttgatataacgggggagataaaatgattattgaaaaaattaataacaacgtatgcaatatgaatgatttctcaaacacaaaaaagcatcttgataagatattaatttctagtgagcttttactgaagagagttcagaaattatattcagaatctggttttgaaattggggtgtctttagatagtggagaaacattaaagaacggtgatattttatatgaagatgaaaatcgaattgtgtatattgaagtattaccagaagaggtaattgtaattactccaaaatcaataaaagaaatggggattattgctcataacttagggaatagacatttaccagcacaattcgatgaagggtgcatgattttggcgaacgactacttagtagaagatttacttaaaaaggaaggtgttccttatcaaaaagaaaatagagtattaccaaaaccgttcaagcatgcttcgcacaaacatatttaacctacttaacctactccaaattagtgattcgaacttcccaacaggaagttttagtcactcttttggattagaaacatttattcaagagggacaagttacaaataaagacgggtttttcaaatgggttaatcgatatgtaaaagtccaattaacatacacggacggcttaatttgcaaatatacttacgaagccattaagaataatgagggagaacaaattacatttttagatgatttaataacagcacaaacattgccttttgaatgtagaaaagcaaatagaatgattagtaaaagtacttctaaattattgtgtgaattgttctcgtttgtaaatttaaatatatataaagaaaatattatgggtaataaattacaaggtcatccgagtattgtatacggaatattaggggcggaattgaaaatgacaatagaagaaacgctcttagttttcttatactcaagtgttggaagtataattcaaaacggtgtgagagccattcctcttggacaaacagatggtcaaaaactattacaagaatgccatgaattaatctgcgaatctattgatagaattcaaatactttcattagaagattttggattgaatgatcctgaattcgaaataaatcaaatgcaacatgaagatgtaaatgtaagggtcttcatgtcatagggaggaagaataaaatgataaagcctattaaaattggtatcggtggtccggtaggtgctgggaaaaccatgttagttgaaaagttaacaaaacatctaaatacagattatgaaattgcagcaattacaaacgatatttatacgaaagaagatgcaaagattttattgaaaacaggtgttttatcagaagatagaattattggtgtagagacaggggggtgcccgcatacagcaattcgagaggacgcttctatgaattttgaagcaattgaagaactcatgattagacataataatttagatattatttttattgaaagcgggggtgataatttagctgccacatttagtccggagctagtggatttttcaatttatattattgatgtggcacagggagaaaagattccgcgtaaaggtggacaaggaatgatcaaatctgatgtatttgtaattaataaaacggatttggcaccttatgtaggagctaatcttggagttatggagcaggatacgaaaaattaccgacataataaaccatacttttttacaaatttgaaggatgaggaaggtttacaagaattaataaattggatgagacagaacattatgttagaaggactgaaaaaatgaaatcccctacaggtgtcttaaacattgatatgatggaaaagagacataaaaccgtacctattaaggtttatcataaagatgccttaaaagtaacgcagccaatatatttggatgagtatggtagagcatattactatattatgaattctggtggaggctatttaaaaggagatttctattctataaatataaatgttggtaaagatgcgaaaacatatataacaagccaatcagcaacgaaagtttacaagactccaaatagttatgctttgcaagaattgaatttttatattggtgagaatgctgttatggagtatttaccagacccgttaattatgtacaaggatgcagcatataagcaaaaaacaaatatatatatgcaaaataattctacattgattttatgcgattcagttacgcctggttggtcgccaaatatggagaagttcacataccaatattttgattcgttaacaaaaatatatatggaaaataaacttgtagtatacgatcatttattgctaaaccctttcaaagagtcgttagatcaaatgggaatattaaatcaatattcccattatggtactttcatagttattaatgagaacattacaaatgatttaattgcaacattgaaaacatcactttctaacactaacaatatgaaaattggaatatcttctacaccatgtaaaggctttgtcattcgcatacttagtcataatactgaggatatggagtctatattttttcagtgtcatcgttttgttagagagaattgtctacatgaagaattaacatcctatcgaaaatattaagtaggagaaggggatactatgactaatgtgggattattgtttgtcggtgcagttctatttatgaattcactagcagcttttaaacttattgatagcaaaagtgtaggatactttaatttatttgtaggggcattacaaactttgacaccattatatttattatttacaggaagtcaatccgatgagtggactatcctatctaatggaactatttttttatttggttttacttatttatatgttggtcttacgaatatattaaaacttgattcttcaggtgtaggttactattctctttgggttgctatcattgcaacggttatgggaattgtgaatcaattacatgagagtggtagtttgcaaagtacaataatttggttcttttgggcattcctttggtttttatttttcctacaagatggattgaaaaagaagattcatatttatgtaggtattgtttgcttcattgaatcttggattactgcaacagtaccagctctgttaacacttacaaatcataccgacgtgttaaataattttgtaattattttagcgactattataacgattttagtttttattatggcacttttctttttcaagagtattcaatttaaagtagaaagggttagtaactatgtggaaaagtgaactgaaaaaggcaaccaacttttttgttattattatatttcttcatgtgcttggaattttattattattaccggcgctatataaaggtaatagcataatcggaatggctattattgcatattctttagggttgcgtcatgcgtttgatagtgatcatattgtcgcaattgataatactgttcggaaattaattgaaaaaggtaaaaactcacagggggtgggattttacttctcattaggacactctacggtagtatttgcgatgattgtattaattgctttaattggaaaaacggcaaaacatggaatggagagcttttcaactataggcggtattatcggtacaatcgtttctagtacattccttatcattattggtcttaccaatctgttgtaccttattaaagtgttgagaagccacgaggacaaacagccagaaaatttagggtttatatatcgtttcacacagcgcttatttacgtttattgatagtcagaagcaattgtatataatcggttttttatttggacttggttttgatacagcgagtgaaattggattaattgctctttctacagtaactgcaacaagtcaatctattccacttgtaagtatatttgctttccccgttttgtttgctgccggaatgtcattgatggatacattagatagtacattcatgaatacgaattataagtgggcaatggaaaatagtcgaataagaaattcatataatgtattaattacctcaatatctgttattacggcttttttaatagggggatatcaactattatctttgcttattgaaagctataatttacagggcccgttttggaatctcatacaagtagttaattttgattatctgggtatatgtcttgttgcattctttattatttctcttattgtttttgttgtatggaatagaaatgcctttaaagaaccgcttacaaagagcatagagaaataaaaatatatcatatgtcatttggttcattatgtatataaagtaaaataaaaaacacgttagatgaaaattcatccaacgtgttttttattatttatgttccttatattcatgtactttttctttcacattaccaactgtatctttagcagtgcctttcaccttatcccattttccttcagcttgtaatttcttattgtcagttactttcccaacagcttcttttacttcgccttttaccttatcaatggcaccttctactttttcttttaaaccgtgttcatgcttagtcatacatttctcctccttgtagtttgattagaattctcttttcatagtgcaagttgaatgatgtacctagtaatagcgtaacaaatctagttggaatattcaaatgattaataggatagaaaaggaattgtcataaaatgtttaaaaatgtaacggaaggagaaataaagtaaattataatatgtctcttgcggtccatattgattttgtataagcaattttcatgtgggcacgttccatgttattttgactgccgctaccgaaccttgcttgtccaactattaaagtacaattggattcaatagctgtcttaattcgtttttgaattaatgcagtatgacagcctttacgctgaaattctggcaaagtagcagaagcagctaatgatgcgacacccttatttatatacaggacaccaataccagcagggatattttgaacttcagctatgaaaaaatgccatcctggttcattgtaaagaatttcattattttggcgcacgctatcttttgtaaaggatggcatattaaatccacatacataaatgtctgcaaaaatatcaaactcattttcttttagttttcgtattgtaatattagaaggaagaagtgatgaaccctctctcggtatactatacaaagcggtatggaagctagattgataaaaccctttttgagataagtattgaaataattcagttgtaccttgtgctggggtaatttcaaaacgacaagggatttgtagtgattcataataagaaatgattgcatcaatcgcatctgcatttgtaataccttttaccgtattaaaagcaggaccagcaattatttttgatgaaaaggcagtggcgctaccgaatttttttatttgcacttgcatggggtttccgcttattgtttgtagtctctctaatctagaagagagcatatcaatttctgcattttcaatttctgttgctatatcgagtgtcataacagtagtcataaaattcctccgttaataaatatatttcatagtatatatacgatttttgttttgagattcctgttgtaatgtaggagaataagaagttttttggaagggaaatggaattgaactgtcgaagggagtagaaacagattaaaggtggtgctctcatgaaacagaaagacgtgcagacatgctctaattgtggttctcaaaatataggagaaggtgagtttgttggatatgcacaaatacggaaaaaggaaacgatgttcacatcttcaccggtggatgcttatatttgtacagattgtgggaatatccttttattaaaggtaaggaattatgaaaggtttaaacagaaacctttatgattattgagaagtggtcatatccaactttgtatacgaaacgacttatgttaaggaaaatgaatatgagtgatagtttacatatatatgagtatgctacagataaagagatgacaacttttactgtatgggatgctcattgatcgttatgtgacacatataactatatagaagaaattgtggggcaatataatggagggcaagtagcacctcttggaattgtattaaaagaggagaagaaacttataggcacgtgtggatttataaaatatgatttggtcacacatacagcagaaattgcatacgccttatctcgaaaatattggggaagaggattagctacggaggctgcattagcttttttctactatggttttcatgagttgcatcttaatagtattgaagcgggatgtgattcagaaaatgaagcatctgaaaaattaatgaaacgtttgaatatggagtacgagtgcacgattcaaaaggatatgttcattaaaggtaagtatcgtgacacgaaaagatattgtatatctcgagaaagatatatggataaatgaaatatttcatataaaaaactcctttaaatgaataaaggagtttttttatttttcataacaataattacctttaattgttataattggttgttaaggggtcttggtttattaacgccataatcatagaaggaaaatagctaaatcgtctataaaaccactaaataacacaatcgcaaccgtaagttgacaaagtgcaaccccgggaagatagagataagggcaatgtctacatacaatttaggtaagaaaacaaaggggggcacacatatgggatttggtgaaaagctttttaaattaagaaaggaaaagggcctttctcaagaagcattagctgaaaaattaaacacaacaaggcaagcggttagtaaatgggaaaacggtcaaggttttcctgaaactgaaaagttaataatgattggaaatgtttttgaagtatcactcgactatttattaaaagaaactgcagagcaaagtaatgaaaatgtggatggctattacgtaagtcaggaaatggcagaagggtatatagtgtacggacaaaagatttcaaaatatatagcgttaaggtttagtttgcttattttgtctacaataccgtatctattatttaaagaaaatgcaacaatgtcgacatttcttgtcattatcattgctgttcttggaattggagcaatgatggcacctgtaacgatagaagagagtcgatacaatgtattgaaaaaggaagaactactatttgatcaaaactttctaaaagaattgacaaaaagatatgtgattattaagaagaagtatgccgcggtaatgatcgttggattttgttttatagcagcaggcgcgatcccgtttttgtttgagaaaaagcatatcacttcaggggaattagttcagtattatccgtactgtgttgtacttattgctatcggagtttatctttttgttcgtgtgttaggagtatgggagatatatcgaattttagtagaaaataaggaatacagtaatcgttttatttttaaactgaaaaagaaagtaagaaaaaaggtagatagtttataaaagataaaaaacatgtttcgaatcaatgtattcaaaacatgttttttatcgttctgaattatttccaaagaaataattcagaaaaaacagaaaaatgtcgtaaccatttacggaagtctgttataataaacgaaaaatgaaaacgctttaaagggggatataaccaatatgatgatgaatgtaccgctaacaattagttctatgatggaaagagcagagaaactgttttcgaagaaagaaattgtttcacggacacatgatacagttacaacgttaacatataagcagttaggggaaaggacgagaagactttccagtgcgttgaaaaagcttggaattaaagaaggtgaacctgtaggaacattagcgtggaaccatcatcgacatgtagaagcgtattttgctattccaggtattgcttctgttttgcacacgattaatattcgtttatctcctcaacatatttcatacattattcagcacgcagaagaccgaattctacttatagatgaagatctcgtaccgctcgttgaaaatattcaatcacaattatcaactgtacaagcttacattattatgactgataaagatgaacttccaaatactatgctggagcctgtatatcattatgaaaagctattagaagaaggcgatcccaatttccaatttgtaaaagatattgatgaaaatacacctgctggtatgtgttatacgtcagcgactacaggaaacccaaaaggtgttgtatatacgcatcgtagtactgtattgcattgtatggcactcggtttagctgatacagctgctttatcggaaagtgacgcagcaatggcaatcgtcccgatgtttcatgtgaacgcttggggacttccttttgcggctacttggtttggatcaaaacaagttcttcctggaccgatgtttaccccgaaaattttattagagatgattcaatcagaaaaagtgacgttagctgcgggtgtgccgacaatttggctcggcgtattacaagagttagaaaataatagttacgatttatctagtatgacgagaatactatgcggaggtgcagctgcgccgaaaagcgttattaaagcatttgaacagaaacataatgttccattcatacatgcatatggtatgactgaaacgagcccactcgtaacacttgcacgtttaaaaagttatgaaacagaattatcgtatgaagagcaattagaaattagatcaaaacaagggtatcttgtccctggtgtagagatgaaagtagtcggtacaaatggtgaagtgaagtgggatggtacggagatgggagaactatgtttacgagcgccatggatcgctgaaagctattataacgataatcgtactgtcgaaggttttcgtgatggttggttatatacaggagatgtcgttacggttgatgaggaaggctgcgtgaaaattgttgaccgtacgaaggatgttattaaaagcgggggagaatggatttcttcggtcgatcttgaaaatgctttaatggcacatgatgctatatttgaagcggccgtcgttgcgattcctcaccctcagtggcaagagcgaccaattgcctgcgtcgttcaaaagaaaaatagtacggttacaaaagaagaaatatatgagtttttaaaaccacagtttgcgaagtggtggttaccagatgatattgtatttatggaagaaataccgaaaacatctgttgggaagtttttgaaacaggcgcttcggaaagaactggagcatttgcatagagagaaataagtgaattcttatttgtaaacttaaattaaataaaagttgacaaaagaagggtggaaagataatataattttcgtgatatgttacctaaaaacacttttaagtttacaaacaggagaagaaaatatgcatacaaaaaaattagttttcgtcgctttatttagttctattatgggagtgttagggttaatacctccgattgctctttctattacaccagttccgattacattgcaatcactcggtgttatgcttgcgggtggattgttagggtcacgccttggtgcattaagtcagcttattttcttacttattgtaggagttggagcaccattacttgctggtggacgcggtggccttggtgtatttgttgggccaagtgcaggatatttacttggttacatcattggagcgtttgttattggttatttaattgagcgtttacgtgaagtttctattataaaagtattatgtattaatataattggtggtattttcgtagtttatgtatttggtattactgtacaagcgtttttaatggatgtttctgtatgggagacaatgaaagtgagtgctgtgtttttaccaggggattgtataaaagcaattatcgcggcgattctcgtaacaaaattacatcgttcattgaaacatattattacgcccgctttaaagaatggaaaatatacaaatgcgggatgataaagggaagaaacacgttaattccgtgtttctttttattatttttgtaaagaaaggacgtctcatatgggtattacaaaagaatacaaaaagcatgcctctttacaaccaaataaaatagcgataaaggaaaatgatagagttttaacatataaagagtggttcgaatcagtttgtaaagtagcaaactggttgcacgcaacagaatcaaagaataaaacaatagcaatcctattagaaaatcgtatagagtttttacaactattcgctggtgccgctatggccgggtgggtttgtgttccgttagatataaagtggaaacaagatgagctcagagaaagaattgagatcagtaatctggatatgattgtgacagaacgatataaggtaaatgatctacctgatgaagaaggaagagtaattgaaattgatgagtggaaaagaatgatagagaaatatcttcctacacattccactgtagaaagtttacgaaatgctcccttttatatgggatttacatcaggatcaactggaaaagcaaaagcatttttacgtgcacagcaatcgtgggttcatagttttgattgtaatgtacatgactttcatatgaaaatggaggattcaattttaatagctgggacgctcgttcattctcttttcttatacggggcaataagtgcattatatgtaggacaaacggtgcacattatgagaaagttcattccgaatcaagtattagataagttagaaactgaaaatatatcggttatgtatacagttccgacaatgcttgaatctttatataaagaaaatagattaatagaaaataaaatgaaaattatttcatcaggagcgaaatgggaagctgaagcgaaagaaaaaataaagaatatatttccttatgcgaaaagatatgaattttatggtgcatcagagttaagttttgtaacagcactagtcgatgcagaaagcgaaagaaggccaaattcagtaggaaaaccttgtcacaatgtgcaagttcgaatatgtaatgaagcaggcgaagaagtacaaaaaggcgagataggaactgtttatgtgaaaagtgatcagttttttatgggatacataatagatgggggtttaacacgggagttgaatgcagatggctggatgacagtgcgagatgtaggctatgaagatgaagaaggctttatatatattgttggtagagagaagaatatgattttatttggaggaatcaatatttatccagaagaaatagaaagtgtattacatgaacacccagctgttgatgaaatagttgtaattggtgtgaaagatagttactggggtgaaaagcccgtcgcgatcgtaaaaggaagtgctacgaaacaacaattaaagagtttttgcttacaacgattatcctcgtttaaaataccgaaagaatggcattttgtagatggaataccttatacaaatagtgggaaaatcgctcgtatggaagcaaaaagtatgattgaaaaccgggagaaaacatatgaataaggcagttattgtagaggcgaaaagaacacctatcggtaagaaggatgggatattaaaagagtatgaagttcagcaattagcaacgccgcttcttacgtttttaagtaaaggaattaagagagagatagacgatgttatattaggaaatgttgttgggccaggagggaatgttgcaagattatctgctttagaggcaggacttggctatcatattcctggtgtaacgattgatcggcaatgtggtgctggtttagaagcaattcgaactgcgtgtcatctcattcaaggcggggcaggtaattgctatatcgccggaggagtagagagtacaagtacgtcaccttttcaaaaaagagcaagattttcacctgaaacaattggtgatcctgacatgggagtagcggctgaatatgttgcggagcgttataacataacgagagaaatgcaagacgagtacgcttgtcttagttataagcggacactgcaagcgttagaaaaaggatatatacatgatgaaatattttcttttaatggattattagatgaatctataaagccagaaatgaattatgaacgaatcattaaaagaacgaagcccgcatttttacaaaatggaacagtgacggcaggtaattcatgtggtgtaaatgatggggcatgtgctgttcttgtaatggaagagggacaagccctaaagttcggttataaacctgtccttcgtttcgttcgtagtactgtagtgggagtggatcccaatcttccagggactggtccgatatttgcggtgaacagattattaaacgaaatgaatgtaaaagtagaggacatcgattattttgaaataaatgaagcattcgcctcaaaagttgttgcttgcgcaaaagagttacaaattccgtatgaaaaattaaatgtaaatggtggggcaattgcgctcggtcatccgtacggtgcatctggggctatgcttgtaacacgtttgttttatcaggctcaaagagagtttatgaaatatggaattgctacattaggaattggaggcgggatagggattgcgctattatttgagaaagtagaagactagtgaggtaactagttttctactttttgaggaacataaacattgctgccaggcttcgctttcatttcgttccaagcagcaatcgcatcagcttttgcttttcctttattatttggatctttgaaaaagtcccgagtaaagcgattgtattcaaattgcgcgctgatcgttgttttataagtaggatctttttttcgttcgttttcttcataccaaaatgttatcgcgtcttcatatgtttttccaacattctctttaaaaaacttttgaagagctactgtaaagcggaagtttgtttcgattttttctttgaaaaaagcacgaacatcttcgctacagcggtgatttttagtaataatcgtttgaagagaaaggtctttataagagaggggagctttgctcacttttggcacagagctgttttttaagactttccccgtagttaaataatgtgagatacgctcggttatttcgatcttagagccactagctggcagaccatgctcgcgacaaaatgtttgcagttctgcttttaaccaataataattttggaaatctgtaagagatatagtttttgttaaagatggtcgcatgaatgtaacaactactttcttccataattttctttaattataaaacatacgttctttttatggaaggattaatgtgtaaatataatgggaagaggaggttatatatagaaaatataatgcaagttcgtgttacgggaattttaattgaagatgaaaaagtattgctagtaaagcaaaaagtggctaatcgcgattggtctttacctggaggaagggtagagaatggtgaaacgttagaagaagcgatgattcgagaaatgagagaagaaacaggattagaagttaaaattaagaagctactctatgtttgtgataaaccagatgctagtccatctttgttacatattacgtttctgcttgaaaggattgaaggtgaaattacactaccttctaacgagttcgatcataatccgattcatgatgtgcaaatggtaccgattaacgaattaagttattatggtttttcggaaacttttatcaatcttataagtggcggttttgcaaatgcaggaagttatcaagggttgaaacaacatataggcctgtaaatatagttgaaggatagccgttagctatccttcataaacatgttttacactgctgactgtaaagaagaaacaagctgatttaaaaactcgtccccgttcataaccgcttttccgccgccgcgtgcactctttttatttccgccaccttttccttcaattgtaggaagagcatcttttaaaagagcattcatatcgagcgttactgtttttccgcaagcgagaatacattgtagtttgtcatcattttcaataacgaaatacgtaattgcatgctcttgttgttctgtaatgatagctgatatttttgcaatttcttgcatagaacgatctgtaaatgctttagaaataagtaacccagcatgtatttcggtgggctgttgcagtaattcatttgcctctgcaaataataatttttcattcattgtttgtgttgttttttcgttttccttttgagaggtaagaagctgtgccacttttgctgggatatcagtttcgctactgtttaattgtttggaaacatctttcataatttgttgctgttgccccattaatttaagtgtacgccaaccagcgataaaggttaagcgtataccacctttattgcgctcccatcctagtacttgaataagaccaacttcaccagtgcgtttcggatgggttccaccacagccgttgtagtcgtaattttcgataataacaacgcgtatattttctgttatattcggttctttacgaagaggtaatgttttcgcttcttctaagttcatccactctatacggattggatggttttcaaaaacaattttgtttgcaatttgtactgctttttcaactgtttctgtatgcagattttctgtttctaaatcgattgttaccgtttctttaccaagatggaatccaatcgtaggtatgttaaaatggtcccaaaaagcagcagataaaatgtgctgagccgcatgttgctgcatatgatcaaaacggcgctcccaattaattttaccttctacgtcttctgtatgtaattgttctgcgatgtagtgacgaatttctccgtttatctcttctacattgattacattgatatcatttaatgtaccagtatcatatggttgtccgccacctgtcggataaaatgctgtttcattcaaaacaacgtataagttaccgtttttatcataatcttgctttataattttagtagtaaagtcttgcttataagcgtcagtgtaatataatttgtgctccaattttctttctcctctcgcattaactagtttcattgtaaagcaattgaaattagtttcctaatatttcagaagaaagaaactatttttagaattttcttgctataataagaagaaaatgcgggggtggaataaatatgttatatgaaaatggcgtagataaactgcttagtttaagcaaaaatatttctgaattgtatcgagaattaaatgaaatgacccggattttaacggagtgtaatcgagaaagtgtgaagtttgatcggttatatgtaaaagagttactttggaagaaagaagatgtaatagagaaatatgaccagctacttgtacaactttgtattaacgaatgctttgatctaaaaagtgtcattacaggcgaatataagtatacatatgaagaagtggagaacatcgttttacaatttaatgagaagtataatgttgcaatattaattaaagatgtttgtaaagaattacagtttacatatggcatagatatggatataacgagaacagcgcgggtatcaacagcgcaagtataaaaagggaaaagaaagcagatcctttgctttctttttttatgtaagaacagggagagtaggtttttaagatgaaggggaagttgcaaaatattcatccgttaggaatgacaattataatagggactttatttgcgaggtttgccacgtcaatgagtattccttttttagcaatttatttaacgactgtgaaaggtgtatcagctggaatgacaggtgctattatcggaacgagtgcacttgttggagtgtttgctagttttatcggagggaatttatcagatcgattcggtcgaaatatgattataatatggtccatgatcgtttgggtctttgtattcattggtttttcacttgcagatcatgttttaagtttctttttattaaatgctttgaatggattatgtaggtcattttttgagccaacatcaagagcgttattatcagatttaacgaaacctgagtatcgtttactcgtatataatttgcgttacggtgcaatcaatgttggagtagcgattggcccacttgtcgggttacagattggaagcgcaaaatcaacaattccgtttttagtagcagctggagtatacattttatatacagctatattagcgttccaatttaagaagtatccgattgaaaaaaagaaagtaaatacagaaaagcctgtcacaatgttaaaggcaattcgtattttgcgaaaggatgtcgtatttttagttgcactagttggtattattttgagtaattgtggtttttcacatttaacgacaacagtatctcaatattttgcaaatgcacatatatttcaggatggagtgaaattattttcatatatgctagctttaaatgcgattgttgtagtcgtaattcaataccctgttattcaaatttgtaaaaagtatacaccgttaacatcaattatggtgggggctttatttgtgagtgggggattatttggctttggaatagtagaatccatgctaggtgctgccgtttgtacaattatttttacaattggagaagtcttaatgttttcgatgacggatgtatttattgatgatattgctgttgcgcatctaaaaggaacatacttcggtgcgatgggcttttcgggaattggagcagtaataggtccgtggtttggaggagtacttctcgattactacgggtaccaaaatgggtttgcagtattttcagcattagctacattctcaactgtggcatttcctgtgcttttagttacaaaaggtttattgaaaaaaaggtatgatagaaattctaatatagaaatgcatgcgaaataacataagccccagtaccaactggggcttatgtttgtattatattaactcttaatttgaaaaaagaactttcttttcatgtttatcagcaacttcatttttggaaatatgaatggccaaaaaaccattctctaagcaggctagcatcttcttataaataacattagcgggtaaagggatagttcgctgcaaagaaatgtttttatgaagtatgcaaatggttaggcctgtctccatctttttaatgactacattttgttcattggcatttggtacatctgtttccaaaatgtattcttgttcagtttcgcaaaggtcaatatgaatttgatttgggaaactaaagttactacaagagtcagaacaaaactgatccatccattcttcgaaaccatcaacatgaaaaagacaatccttctttttcttgcccatgtaagacaccctccgtaaaatctcaattcatactatgttatgcatgaatgaattaggggtgaagaataaatggaaaaatataaacattgtatgtggaaaagatagctagtgtgcactttttgttttacatatcatgatgcgcatgatgtttttggcgtgaatggttacggttttttactttatgagatccgcttaatggttcaggttgtccttttttttctttcgcttcacgattgttttttcccattgtatgtgacacctcctcttcctttttagaatgagagaagtttgcaaatttatacgagaatgtttttagaaaaaaaggtaaagataattgggactaactattacagaaaggggattatataatgccatatcataaagataaacaacaagcgtttcaagcagcgcagcaaggcgttacacaagcagaaaatgcatttaacaacattgtgaaaaatgatccaaactacggtcatgatttaaaagaattacgccaagaggttcaggaagcatatgaacaaattcaaaatgcactagaggtagcttcagaaacacaacgtccacaacttgagcaatatgaaaataatctccaaaatataatgcgaaatgtagatcaattagaaaagtaaattaggttgttgtgtatttgacaacctaatttactttaatgaacattatgcgaaaacagaaaatttttctattcgttttttctttattatgcgcagtacatatatttcaagttgaaaaagtggaagcgaaaatgttgctcagaaaagagctagaaccaactggctatgtaacgtgggaagtacctaataatgaaaaaattattgccattacatttgatgatggaccagatccaacatatacaccacaagttttacatttattacgtcaatataaggctgaagcgacattttttatgattggatttcgagttcagcgcaatccatatttagtgaaacaagtgttaaaagagggacatgagattggaaatcatacgatgaatcatttatatgcaaatagttcatcagatgaaaaattaaaaaaagatattttggatggaaagaaatttttcgaaaaatgggtgaaagaaccgttgctattccgtcctcctggtggatatattaacgatgctgtatttaaaacagcaaaagaagcaggttatcaaaccgttctatggtcgtggcatcaagacccacgtgattgggcaaatccaggggtggaatctatcgtaaatcatgtagtgaaaaatgctaaaagtggcgatattgtattgttacatgatggaggaaatgatcgtagtcaaacggtagcagcactagccaaaattttacctgagctaaaaaaacaaggctatcgatttgtaacggtttcagaattgttacgttataaacattagaaaaaatcccaaaaggtgaatgttccttttgggatttttcgttactggttctttttgcgtttcttattattttgtctttctgcaggagttaagttttcatttgcaaactcttcgttataaccagtaccttgtccttgtgcggatgctgcattcattcctgaaatagtatgatttgcttttcttttacccattttatttcacctctataacatttttttgtatgttgaatgatgagcagttcatagtgtgtatgaactataagtaaagcgctaatagagcactttactttatggtaatagtattcataaggagcatgaacactattcaaatttagaaacataaagaaaacttatgataatctataagtttcttattatttacttatttagaaagttgtaataagatattatcgtaaggtattgaaaagtttgtctacattttatattcagacaacttagtcacgtttaacaggggggaaacataatggtcaaacataatccatttcaatcacgtgcaacttttgaagtagatggaaaaacgtatcattattatgatttgaaagcgcttgaaaatgcaggggttggcaacgtatctcaattaccatattccgtgaaagttttacttgaatcagtacttcgtcaagtagacggacgtgtaattacagaagagcatgttacaaatttagcgaaatggggaacgaaagatgtgcaagatatcgatgttccatttaaaccatctcgtgtaattttacaagatttcactggtgtaccagctgttgttgatttggcttcgcttcgtaaagcaatggcagacatgggtggagatcctgataaaatcaatccagaaattactgtagaccttgtaattgatcactctgtacaggttgatagagcgggtacggcagacgcgcttgcattcaacatggacttagagtttaaacgtaatgaagaacgttataaatttttaagctgggcacaaaaatcatttgataactatcgtgcagttccaccagctacaggtattgtacaccaagtaaaccttgaatatttagcaccagttgttcatgctgtgaaaaatgctgaaggtgacttagttgcatacccagattcattagttggaacagactcacatacaacaatgattaatggtatcggcgttcttggatggggtgttggtggtattgaagcagaagcaggaatgcttggacagccttcatacttcccagtacctgaagtaatcggtgtgaaattaacgggtacacttccaagtggtacaacagcaactgacgttgccttaaaagtaacgcaagtattacgtcaaaaaggtgtagttggtaaattcgttgagttcttcggtaatggactaaagagcatgcctttagctgaccgtgcaacaatttcaaatatggcaccagaatacggcgcaacttgtggattcttcccaatcgatgatatttcattagaatacttacgtttaacaggtagagatgaagaacaaattcgcgttgttgaagaatactgtaaagcgaacggtttattctatacagcagacagtaaagatccaatctacactgatcttgtagaaattgatttaaatacaatcgaatctaacctttctggaccgaaacgcccacaagatttaattccactttcagatatgaaagatgcgttccacaaagctgttttagcaccagttggaacacaaggacttggatttaatgagcaagagttcgataaagaagtgaaggttacattagaagataaagaagtaacgatgaaaacaggtgcaattgcaatcgctgcaattacaagctgtacaaatacatcaaacccatacgtattaattggagcaggtctagttgcgaagaaagcaattgaaaaaggacttgtagtacctgagtatgtaaaaacatcattagcaccaggatctaaagttgttactgagtacttagataagtctggtttaacaacatatttagatcaattaggtttccaaacagttggttacggttgtacgacttgtatcggtaactctggtccattagcgccagaattagaagaagcaatcgcagcaaacgacttattagtaacatctgttttatctggtaaccgtaactttgaagggcgtatccacccacttgtaaaagcaaactacttagcatcaccaccactagttgtggcatatgcacttgcaggtactgttgatattgacctgaaaaatgatgaaatcggtaaagatgcaaatggcaatgctgtttacttcaacgatatttggccatcagctaaagaaattgaagatgtagttcaaagtgttgttacatctgaactgttcaagaaagaatatgcacaagtatttaacagcaatgagcgttggaatgaaatccaaacttcaaacgaagctttatatacttgggataatgattcaacatacattcaaaacccaccattctttgaaggtttatctaaagagccaggtgaagttgaaacattatcaggcctacgcgtagttggtaaatttggtgactctgtaacgacagaccacatttcaccagcaggttcaatcggtaagcatacaccagctggacgctacttattagaaaacggcgtacaaccagttgactttaactcttacggttctcgtcgtggtaaccatgaagttatgatgcgtggtacattcgcgaacatccgtattaaaaaccaaatcgcaccaggaacagaaggcggatatacaacatattggccaactggtgaagtaacatctatctatgatgctgctatgaaatataaagaagatggcacaggtcttctagttgttgctggtaaagattacggtatgggaagttctcgtgactgggctgcgaaaggaacaaacttactaggtattaaagcagtaattgcagaaagctttgagcgtattcaccgcagtaacttagtgttaatgggtgtactaccacttcaatttaaagatggcgaaagtgctgaaacgttaggtcttgttggtaacgagtcatttgaaattcaaatcgacaaaacagttagaccacgcgatcttgtgaaagtagttgcaactgatgcagatggcaatgaaaaacaatttgaagtagtagctcgtttcgatagtgaagtagaaattgactactaccgtcacggtggtattctgcaaatggttcttcgtgagaaaattgaagagtctaaagtgtcgaactaaataattgaaatgaataataaggaagctaacaatagttagcttccttattttatggaaagggatgaaaccatatggtttcatccctttcttttttactacgaaaaatggaggaaacgtcatgaaagaatataaaagaattttgttaccgttacagaaagaaaaaatattagtaatagcagctgtatgtagtgggataattgctgccattttaaatttatcccgcccaattttcatgggattaattgtagacaatcttattcaaagggagctaaaaggtgcgtatgtatatatagctttgtttgcgggtagtcactttttaatgtgggcgaacaatcttttatttgattatataagttcaaaagcgagtcaacgtatattacaaacgaaacgtatagaattattgcgtcactatttctcattaccgtttgaagagagtgagaagattaagcaaggagagttagaaactttggtcgtgtctgatattccgaactgggtcagattatatggctctatattaatagaatatatacacgctattgcccaatttattggagctttcatagcactacaacatatagatatacagtttatattgtgggtaactccgtttttatttttaagtacaattgttccaatactgatgggagaaaaggtaagagatattgcaagcgtttctcaaaaaaatcactcaagtgttgtagagatggtgtcacagtttgtaaaggggatacaagatttgcggagtttacaaaaagaaaaatgggcaattcgcttatttaaagaagtaacggcacaatcgtataaatcagaagtaaagaagacgatgatgcaacattgcattggagtagttggaacggtgattgaaacaggagcatatattgttgttctcattataggtgcacaaaaaataatgaggggagaaatagaagttggttcactcattgcagtgttagcgacaattgagatgctctttttccctgtccgttatgtgggcgatttattaataatgacacaagttgcagtcgcttcggcaaatagagctttttgctttttaaataaacgagcagcagatagcaatgtagaaagagcgatggggatcaggataacaaatgtttcatttcaggagaatgacgaagagaaatgcagaattcataatattgatttgcaaattcgtcctggtgaactcgttatgattgtgggagaaagcggtgcaggaaaaacaacgcttttaaagttaataacgggcttgtataaaccatctaacggtagcattgcttattatggtaatgaagctcgtatgactacagtgtggcaagaaccacgttttttccgaacgacggtaacagagaatatgtatttcggggaagagggtttagaaaatcagttagaaaaaaatagtgaacttataaatgcaacgccgattattagagggttacctgaagggagtcaaactgtgctacataaaagcggtgaagagttttcgggaggcgaaagaaaacgtcttgcattattgcgcgcgattgtatcaaatccaactcttattattttagatgaaccgacggctgggttagatccgggcaatcaagaactggtttggaatatgattgaagggataggaagagatgtaacgagaattgtggcaacacatgatgtagagagagcgatgatagcagattgtgttgttgtcataaagaatgggactattgtggaatgtgggaatcctagagaattattaaattgcaactcattgtacaaagagttgcaaacaaaaagataagagatatgtaatgctcttatctttattccgctatttgccgggcagcccgattggtgagggctgattaaagtttcactttattcggtctcattaagttgataagtataagaattcgaatcactagaattaacttctttgacgagagtaagttgatttgtatctggattatatttgaaaatcttaattgtatgttcgctacttagtaatggattatattcttgaatagcgaatgtattttccgcgatttgtgtcatattactggtgggaacattttctatggaatcatgatttgtagaaatttcaacgactttttcactgttgaaaaataaaagaacgattactaaaataactaagcatattcgtatatagcgtagctctttggtgatagggtgttctcccaaaacaatcatcctttctatagctattctatagtagtaatggtagtcatcgtgaaaaaagtaataatgccgaggcctgccaaaaggataaatgagattaatgcgatatagagacaaatatgtccaactgttttttttcaggatctttactaaatagtgagataatccatgtgataattccgattggggaaaatataaaactaagaatatatagaagtatttttttaaataaattcatgagagctcctttcattgtaaaatgttctatgtatttctaattatatgattaaaaggtaaatatttcatcttagttataaaaattctgattatttagaatgtgaatatttccaagcttgtccgtataagctaaaataaggtatatagtattttgatgaatgtgttaaaagaagataatacgttagggtgatataaaatgtggcggaagcttacgattattgtagtgttactttgtttagcgggatatgcagcttatgaacagtttggttataaagagcaggcggtaaaagtgaagcaagaaaaaagtgaagctgcgatgaaagagattatcgcaaggaatggtattgagatagggaagagtgcaccggactttacattaacgaagttagatgggacaaatgtaaagttatcggatttaaaaggaaagaaagtaattttaaacttttgggctacgtggtgtggaccatgtcagcaagaaatgcctgatatggaggctttctataaagaacataaagagaacgtagaaattttagcggtcaattatacgccttcagaaaaaggtgggggggaagagaaggtaagcaattttgctaaagaaaaaggaattacttttcctattttattggacaagaacattgatgtgacaacagcttataaagtaattacgattccaacttcgtattttatagatacaaaaggtgtcattcaagataagtttattgggccgatgacacaaaaagagatggagaaaagagttgctaaattaaaataatggtgaaaaggtagagatggagagttcccatttctgccttttctttttcaagtagtaatcacttcatgatatgatgtaagaaatataaccgtttagagataaaggagtgtatggagtggggaatgtatccttaccgttagattatgttgtaattgattttgaaacaacaggatttaacccttataatgataaaattattcaagttgcagcagtgaaatatcgtaatcatgaattagtagatcaatttgtttcatacgtgaatccagagcggccaattccggaccgaataacgagtttaacaggtattactaattatcgcgtttcagatgcaccgacgattgaagaagtgttacctttatttttagcatttttacatacaaatgttattgtggcccataatgcttcttttgatatgcgctttttgaaaagtaatgtaaatatgcttgggttgcctgaacctaaaaataaagtaattgatactgtatttttagcaaagaaatacatgaagcatgcgcctaatcataaacttgaaacgttaaaacgaatgcttggaattcgtttaagctctcataatgcatttgacgattgcattacgtgtgctgctgtttatcaaaagtgtgcagctattgaagaagaagggaaacgaaaagtaaataaggctatgcttgatgaaactgcggtatatgaagcggtgaaagaaatacttgcatgtaataaacgtaatgtagaatggctacgttgtatgaacgtaggaagttatttagatataaaagctttttatccagttatgagattaaaggtaaaagggcgaaagaaatatgtattaacagagatattagaagaagatgtgaaagaaatatgtacaagtttaaaatgtgaaccggcgttaaaaagtgaagctggtaatacgagaattatgcttaatagcttagaggatgttatgaaattagaaagttatattttagagcagtatgattttgtattacaggcgcttcatgattataaagaaaatgaaatgaatgcagatgaaaagttgaaagagtatttaaatattatggtataaaaaactccgtgtgcaatatattgtacacggagtttttttaggagtactaaaacataaaattttcttgcaaatctgattaaagagttttttgtttgctcatactatgtaataagaaagcgaaggagagagggtgaacaacatgagaagaagtcgccgtaaatcgtttgaagaacttgtaaatgaaaataaacaacaattattaagcgatcgtgaggcaattgatcgcattgaagagcgcattgaaaaacgttatgaaatgaaactttttaagcaagctgaataattcttaacactagtacgatactagtattaaggaggcgatagtaatgggtaatccgaaaaaaaattcaaaagattttgcaccgaatcatattggaacacaatcaaaaaaagctggtggaaataaaggaaagcaaatgcaagatcaaacaggtaaacaaccgattgttgataatggttaaagaaaaggagaatattacattctccttttttatgtataaatttgaggaaagataggtaatttaagatggtgtgtatatacaatattaggagggaagtacatgccaaatccagataatcgaagtgacaacgctgaaaagttacaagaaatggtgcaaaatacagttgataactttaatgaagcaaaagaaacagcggaactttctaatgaaaaagatcgtgctgctattgaagcaaaaaatcaaagacgtttagaaagtattgactcattaaaaagtgaaatcaaagatgaatcttaacaaaatgtacaaaaagggctgacttttgtcagccctttttcgtaatcgtaaagttttcaacaagtaaacgccaattttgtggaaatggcaagccaatcttccaataactaataccgccaatgccctgctctttcattaaattgaatttactttgaatagacctcgcatcttcaaaccaaacttcatgttgtacgccattttcgtcaaagtaattaaaatgtggagcttgagctgtgaaatcatagcggataggaacattatatttacgagcaagtgcaacagctgcgacagagctaactgcttttgctggtggattcccttgtttgaacggaagtttccaatcgaatccgtataagttttgccccatcataattttttggggaggcatttgagattttgcgtattgaagtacttcttttacaggaccgataggagagattgccattggtggcccgccctgccaaccccagtcatatgtcataatgacgacgaaatcaacaatttgcccttgcgctttataatcatgggcttcgaaaaattttcccttttgatttgaacttgttttcggtacgagagttgtgcttaatgtgtacccgctaggtaagcgtgtttttacatttcgtaaaaagcgattatacgcctcgcggtcttcgggtgctacactctcgaaatcgaaatgaatgtctcgcatgccatatttttcagctgtttgcaaaatgttagtaataaatttgttttgaatcgttgcgtcgcgtaaaataaccgatgttagatcggcactgaaattaccattttcaatatttgtaataacgagcatagggattgtttgcccttgcgttgcaatattagcaattttagctgtttcagtaggttcttttaatgtgccatctctttttgcctcaaaactaaaataagctaaatatgttaaaaatggattgatggcacgtgtagcattaactaaactctctttaatcggtatagtggaaggttgtaaataagcgatggattctacagctcgttttgtgccttttggtacatataattgttgtccgacatggagaatagattttaaagataaattattaactttagctaaactagcgagggggacattatatgtttgagaaatccgatagaggctgtcaccaggctgtacataataattatttcctttcgtattaacgataagtgcctgaccaacaacgagcgtttcagcgggatttagtccattgtcttttactatttcgtcaggtgttgatccatattttgatgccaagctatatacgctatcaccgctacgaaccgttacaatttgaatcatatgcttgctcctttcgggaaaagattcactatttttattttatttttgatgtcactgtattatgattaaatgtatgcaaggtagcagaagtgaaagaagggaagaaacagttagtgtatatctacaaaaatatataattagtgataaaatatttgtagatgaaaaattgtcgccggagtaaagtagtttcatgggatgaaaaatatgaaagtatattcaattggtgattttgcaaaaaaaggcaggtaggatagaacaaactagttgccatcttcaagggaaaataagctaagaagatggttaaggggttgctggaaaatgatgcttgcgaagaaagtgagaatcaagccgaataaagaacaagaattgcaactttggaaatctgttggtacggcaagatgggcttataattggacactggcgaagcaagaagagaattacaagaatggcggaaagttcatatcagacgtttttttacggaaagaattaactgtattaaagcagtctgaagaatatgcttggttgtacgatgtttcaaataatatagccaaacaagcgattaaagatgcttgtgaagcatataagcgatttttcaagggactggctgataaaccacgattcaaaagcagaaggaaagcaaaactctctttttacaatgataatgtcaagttaaaagtaaaagaaaaacaagttttgattgagaaagttggttgggtaaaaacatccgaaaagttacctgtaggggttaagtactctaatccacgcgttagctttgacggtaagtattggtatttgtctgtcggtattgaacaggagtttacaaaagagaaattaacggctgtttcgttaggaatagatattggaatcaaagaattagcatattgttctgatgggcagaggaagaacaatatcaacaaaacaaaaatggtaagacaggtagagaaacgccttcgtaggttgcaacgtcaagtttctcgtaaatatgaaatgaataaggagggaaaccgttttgtcaaaacaagcaatattataaaaatcgagaaagagatacgacaactacatagaaggttatcaaatatcagaaagaatcatcttcatcaatccacgagcgaaattgtgaaaaccaagccatttcgcattgtgatggagacgttgcatatgaaaggtctgctgaagaatagatacctagctaaagcgattgcgaagcagtgtttatatgagttcaaaagacaaattcaatacaagtgtgaaaaatatggtattgaatttgtagaagctgatacatggtatccttcttcaaaaatgtgttccagttgtggaagcattaacaaagaactaaaactttctgaccgtgtatacaaatgcacttgtggtcacgaaatggatagggatttaaatgcggctatcaatttgtcacggtatgaattagccagttaacatctaaaaaagttacggctaatatgtaggattcgttgtatccgaatttacgccctcggagtgttacatcaaacgaaagtagcttctgtgaaatcggacacgtagaacagggaaataaacaaaaattatagatttttataagtttatggcaacggcgaatatacatatgtttgtagcagaacatgaagttgaaatccgttatgcggaaacagatcaaatgggtgttgtttaccattcaaactacttagtgtggcttgagttaggtcgcacgaaacttatacaagatttaggtttttcatatgttgaaatggagaaagaaggaattatttctcctgtgttagatttacaaatttcataccgtaaagcgatgcgttacggagaaaaagcaatcgtaaaaacatgggtagatactgtgagcccacttcgcgttgtatatggatatgaaatatataatggtgatggtgaactttgtattactgcaagtacgacgaatatttgtgcgaaaaaagaagggttccgccctgtatcatttaaaaagttatatcctgagtggtatgcgaaatatgaggaaattaagaaaaaataaaaaagcgtggcagaagccacgtttttttatttttcataattaaattgtgggaagtcgtcaccttcgttaagtgtaacagataaattatgtccatcgaagaaccattcatcatcgccttcaataaagaagttaataccttcttcttgaacttgaacagcaggatgtgcaggatcatctttacgaatccctaaagaaagtcctttttgcacagtactgcaaccaccgtattgtacgaaaaagcgtagtgtttcatttgattgtaagtttaattcatttttataccattgtgctgcttcttttgttacggaaagattcatgtatagttcctccaaattatgttgctttttctttagtataaaaaataacgcaaaaagacgctattaatatgcttcacgttttctttttgcgttatgtgggttacgatcttatttttgcttttttgaaaagtttgcttttggttcagttttatttataattcgtccgatatttgcacggtgtttataaataaccatacctgctaataaacacatcgcaataatgaagattttatccccgctaacaatggatgcaataacagcaacaactgctgttaccatagaagaaagtgatacgtatcttgttgtaaataaaagggtgaaaaatacaacagccaatattgcaaaaacaactggtgaatagcataatagcaccccagcagaagttgcaactgctttaccaccgcggaatttcgcgaagattggatagacatgtccaagaacagccgctaacccgaaccatagtggatgaatatctaatccgaaaatcattggtagacttgttgctaatgtcccttttaaaatgtcagcaattgtaacggtaaaacctgcttttttccctaatgtgcggaatgtgtttgttccgcctagattaccgctcccgtgctcacgaatatcgattccgtagccgatttttccaacaactagtgcaaatggaatcgagccaagtaagtaggcaacgataaataaaagatatgtagtaaccataagttcagtctcctttattcaaatgtgttgataaagggtaaaaagagtttttcccgtatattgtaccatacatttgtaaagagcacatttcttttttgtaaatgaaaaattcattatttcgtgaaaaaaatttcacagtaatgttacatttctcacagaaacagtaagactatatgtagtaacattttaatcaaaagataacaacatattggtggagggttataaatgttacaaaataatacacgtggagaagaagaattaatgaaagtgttcgagacaatagtccacggcaatgaacaagatttaatgcaagaaaatgcaaatgtagacggccgctctccaatgggcgtaatgggaacgttcgcatctgagagtgcaaaatattatgctgttgagaatttattgtcagatcaagtgaaaaaagcgataaatgaaaatatattatatccacatgatttagatttttatgcgacaggaacgacgacttgttcacaaattccgttagcgcaaatgcttgctaacggttttcatactggacatggacatatgagacaaccgcaagacattaaaagtgcattggctctttcgtctattatttttcaagcgaatcaaaatatgcagcatggtggtcaatcgtttgcactctttgatattgatttagcaccttatgtacgaaaaacaattgagagacataaaaaacgattacaatcatatccgcttacgaaagaacaaatagaggaatttgcatggaaagaaacggaaaatgatacgtatcaagcgtgtgaggctttcgttcataattcgaatagtatgcatagtaggggcggaggacaagtaccatttatttctattaattatggaacagatacatcaaaagaaggaagaatgttaattaaacaacttttaaaagcgacacaagctggacttggtaaaggagagacaccgatttttccgattcaaattttcaagatgaaaaaaggtgtaaattttgaagaaagtgatccgaactacgatttatttgaattagcattagagacaacggctgaacgattgttccctaacttttcatttttagatgctccgtttaatgcagtacattatgatggaagaccggaaagtgaagtatgttacatgggatgtcgtacccgtgttatgtctaatatacatggagaagaaacagcgattggtagagggaatttatcatttacgtctattaatttagtgaaattagcgttaattagtggttcaaaagaagcgttttttgaagcgctaaactattatttagatttaggaattaagcagctattagaaagatatgcgtatcaatgtacgaaacgagcaagagattttcagtttttatattcacaaggtgtatggcgtggtggagaaacgttgcagcctgaagactccgtagcctcgattttaaaacaagggacgttaagtattggttttatcggtcttgcggaatgtttagtagctttaacaggaaagcatcatggggaagatggagaatcatggaaacttgggtatgaaattatttcctttatgagagatagaatggataaagcgacagaagaacatcaactgaatttctcagtaattgcaactccagcagaaggattatcagggaagtttgtgaaaaaagatagagaagaatttggtgaaattaatggtataacgaaccataattactatacgaattcattccatattccagtttattataacattcaagctataaataaaatccgtttagaaggcccgttccacgctctctgtaatggaggacacattacttatattgaactagatggagcagcaatgcataacaaaaaggcattaaaacaaattgtacaagccatggcagaacatggcgttggatacggttcaattaatcatcctgttgaccgttgtaagtgctgtagttatcacggggttattgggaatgaatgtccaagttgcgggaataaagatgaggctaatatagaaagaattcgccgtataacaggctatcttgtaggagatatgtcgaagtggaatagtgcgaaacgtagtgaagagatagatcgggtgaaacataaatgaaagtgatgaatattattcatgatagtgtagtagatggagaaggattgcggacagtcgtgttttttgcgggctgtccgcatcgttgcgttggttgccataatccgaaatcgtggaatatttgcaatggaacggaaatgacagtagaagaaattgtgaaagagattgcaagtaatccattaactgatgtaacattttcaggtggagatccattttttcaagctgctgaagtgaaaaaggtagcaaaaatcgtgaaagatttgaaaaaaaacctatggatgtatacaggttatacgttagaagagatacagagttctcaaaataatgatatgatagagttgttacattatggggatgttttagtcgatggaaggtttgaaattgagaaaaaagatttaacacttccatttcgcggaagctccaatcaacgtattattcgattgaaagagtaaaaaggcgggatagattatatgaataaaacagtattgcttgttgaagatgaaagaagattacgtgaaattgttagtgattattttcgtaatgaaggttttgaagtaatcgaagcagaagatggaaaaaaagcgttagagttatttgcagagcatgaaattgatttaattatgttagatattatgttaccggaaatagatggatggtctgtttgtagaagaattagaaaagaatcagcagtaccaattattatgttgacagcacgttcggatgaggatgatacattgctaggttttgaattaggtgcagatgagtatgtaacgaaaccatttagcccgaaagtattagtagctcgtgcaaagacgttattgaaacgtgcggatggtgcggtaggagtagcggaagaaaatgctatgtctttagctggaatagaagtgaatcgtctatctagaactgttttagtagatggagaagaaattatattgacacataaagaatttgaacttctcgtttatttaatggagaacaaaggaattgtgttatcacgtcaacatttattagaccagttatggggatatgactattacggtgatgacagaacggttgatacccatattaaaaaacttcgaaataagctaggagataaagcgaagcatatcggtactgttattcgagttggttataaatttgaagaataatctagaacgatttgtgtaatttagcctagggaaatggcgattttatactctcttttgaaggtagaatgtacaaaaaatactttttttgtctacaatgttagataggagtatttttttaattagatttcacgatgagttcacaagaaggacacaaaacgtgactatactgaaaatacgaattcaccagagaggggaaataaaacatgggatattacgacggaccaaatttaaatgaagagcatagtgagacgagagaagtgagaaaatcaggtagtaaaaaaggctatttcttcacaggtttagtgggggctgtagtcggagcggtttcgattagttttgcagcaccatatatgccatgggctcaaaataatggagcgccagtatcatcatttagttcggattcaaaagtagaaggtactgtagttccagttgtaaataaagcgaaaaatgaaactgatttacctggtatgattgaaggggcgaaagatgttgttgtaggtgttattaatatgcaacaaagtgtagatccatttgcaatgcaaccgacaggtcaagagcaaacagctggtacaggatcaggtgttatttataaaaaagcaggaaataaagcatatattgtaacaaacaaccatgtagtagatggtgcgaataaacttgctgttaaactaagcaatgaaaagcaagttgatgcgaaattagtggggaaggacccttggttagacttagctgttgtagaaattgatggggctaatgtgaataaagttgcaagtttaggcgactcaagtaaaatccgtgctggtgagaaagcaattgccatcggtaacccgttaggatttgatggaagtgtaacggaaggtattattagtagtaaagaacgtgaaattccagttgatattgatggggataaacgaccagattggcaagcacaagttattcaaacagatgcagcgattaacccaggtaacagtggtggtgcattatttaaccaaaacggtgaggtaattggtatcaattcaagtaaaatagctcagcaatcagtagagggaattggttttgcaatcccaattaatattgcgaaaccagtcattgaatcacttgaaaaagatggtgtagtgaaacgtccagcacttggcgtaggtgttgtttcattagaagatgtgcaagcttatgcagtaaatcaattgaaagtaccgaaagaggtaacaaatggcgttgtattaggtaaaatttacccaatatcaccggctgaaaaagctggtttagagcaatatgatattgtagtagcattagatggccaaaaagtagaaaattcacttcaattccgcaaatatttatatgaaaagaaaaaagtaggcgagaaagtagaagttacattctatcgcaacggccaaaaaatgacgaaaacagctacattagcagataattcaactactaagaatcaataagtttaaaccttaattagtaaggttatccgcaaatagtggataaaagaaagtctctttcatattgaaagagactttctttatcggctatactaaaggaataggagggattaattatgacaattgaaaacccaactcgtacggaaattggtgaagtgttaaagaaaagcaaaacaattgcggttgttggattatcagataagccagaacgtacatcgtatatggtttcaaaagcaatgcaagatgctggataccgcattattccagttaatccaacagtagatgaggtgcttggagaaaaggcagtttcttcactaaaggatattaaggaacacgttgacattgtaaatgtatttcgtcgctcagagtttttaatggatgttgcaaaagaatttgtagagattgatgcagatgttttttgggcacaattaggagtacaagatgaggatacatacaaatttttaaaagaaaaagactatactgtaataatggatcgttgtattaaagtagaacatgcgatgacaaaatagtatagatttaaaggtagaaagattgattcagccctcattatagataagtagggccgatgaacgaggtgttcatcatgagattttttaaaggctgtttttgggggttgttatttgtaatcccattttggatcttgatcatttggatcataataaaggtttggaatgtgtaatcttggaatacatatccatttctcgttgacaaacgattatttttctgaaatagtagcctagaggaatccttgtgagaaaacaaggatttttctattgaaaatggtatataaaagagataagataacttgccaaaactatagtcgaggcgttattctataatagaaacatatgttctgattttggattaggaaaggggcaaggagtttggcgaagcatcagttccaatataatgaagatgcgattcaagtgttagaaggacttgaagccgttcgaaaacgcccgggtatgtatatcgggagcacggacagccgtggattgcatcatttagtatatgaaatagtagataactccgttgacgaagcgttagcgggatttggcgacgaaatttcagtcgtaatacataaagataatagtattagcgttatagataaagggcgaggaatgcctacgggaatgcataaacttgggaaacctacacctgaagttattttaactgtacttcatgccggtggtaagtttggtcaaggtggttacaaaacgagtggtggtttgcacggggttggggcatcggttgtaaatgccttatcagaatggttagtcgtaacgattaagcgtgacggaaatatttacgaacaacgctttgaaaatggcggtgttcctgtaacgacgcttgagaaaatcgggaagacgaaagagtctggtactacgatgcatttcaaaccagatacaacgattttcagcacaacaaattataattatgaaacattatgtgagagattacgtgaatctgcattcttattaaaaggaatgaaaatttcaataaaagatgaacgaaatgatttagaggatgtatttcattatgaaacgggaattgaagctttcgtttcatatttaaacgaagaaaaagattccattcatccagttgtatatttcactggtgaacaaaatggaattgaagcagaactagcatttcaatttaacgatggctactcagaaaacattttatcgtttgtaaataacgtacgtacaaaagatggtggaacacacgaagctggatttaaaacagcgatgacgcgtgtgtttaacgagtatgctcgtaaagtagcactattaaaagaaaaagataaaaacttagaaggcacagatattcgtgaaggtgtagcggctatcgtttcggtacgtgtaccagaagaagtgcttcagtttgaagggcaaacgaaagggaaactaggtacaagtgaagcgcgttcttcaattgatgccattgtatctgagcatttagcatactttttagaagaaaatcctgatgtagctacacttcttgtgagaaaagcaattaaagcagcacaagcccgtgaagcagcccgtaaagcaagagaagaagcgcgtagtggtaagaaaaagaaaaaatcagaaggtacgttaagcgggaaattaacacctgcacaatcacgtaacccgcaaaaaaatgaactgtacctagtagagggtgactctgccggtggttctgcgaaacaaggacgagaccgacgtttccaggccgtattaccgttacgtggtaaagtaattaatacagaaaaagcaaagcttgctgatatctttaaaaatgaagagattaatacaatcatttatgcgattggcggcggtgtaggaaatgaatttgatgttgaagatattaactacgataaagttgtaattatgaccgatgccgatacggatggggctcatattcaagtattgttattaacgttcttctacagatatatgaagccacttatcgaagctggtaaagtgtttatcgcacttcctcctttatacaaagtaagtaaaggaaaaggtaagagtgaggtaattgaatacgcttggtcagatgaggaattagacggtgtaacgaaaaaagttggaaaaggctatatgttacaacgttataaaggacttggtgaaatgaatgcggatcaattatgggaaacaacaatgaatcctgaaacgcgtacattaattcgcgtgaaaattgatgatgcagcaagagcagagcgtcgcgttacaacattaatgggcgataaagtagaaccgcgccgtaaatggattgaacgtaatgtacagtttggtatgcaagaagaaggaaatattttagaaaatgaaatgattatggagacggaggtggaataacatgcaagcagagaagtttcatgacctcccgcttgaagacgtgttaggtgatcgctttgcacgttatagtaaatatattattcaagatcgtgcacttccagatgcacgtgatggcttaaagccagtacaaagacgtattttatattctatgtatgtagaaggcaatgtacatgataaagcgtttcgtaaatcagctaaaacagtaggtaatgttatcggtaattatcatccacatggagattcctctgtatatgaagcaatggtacgcttaagccaaacttggaaagtacgtaatgttttagttgaaatgcatggtaataacggtagtgttgatggggacccagcggcagcgatgcgttatacggaagctcgtttatcaccaatcgcatctgaattattacgtgatcttgataaagaaacagttgaattcgtgtcaaactttgatgatacgagtgaagaaccggttgtattaccagcagcgttcccgaatttattagtgaacggatctacagggatttccgctggttatgcaacagaaattcctccgcatcatcttggagaagttattgatgctacaatgatgcgtattgataagccaaatagtactgttgatgatttattaacagttatgaaaggaccagatttcccaacaggcggtattattcaggggattgatggtattaaaaaggcgtatgaaacaggtaaaggtaaaattattattcgcggaaaagcagaagttgaaacagtgcgcggtgggaaacaacaaattgtaatcactgaaattccttacgaagtgaataaggcaaatcttgtaaagaaaatggatgaattacgtctagataaaaagttagatggtattgctgaagtgcgtgatgagacagatcgtactggtttacgaattgttgttgaattaaagaaagaagcaaacgccgaaggtattttaaattatttatataaaaatacagatttgcaaattccatataactttaatatggtagcgatcaataatcgtcgtccaacacttatgacattaccgaaaattttagatgcttatattggacatcaaaaagaggttattacgagacgttcgcaatatgaattaagaaaagcagaaaatcgtcaacatattgtagaaggtttaaagaaagcattatcgattttagaccaagtaattgaaacaattcgagcttcaaaagataaacgtaacgcgaaagataatttaagtgcaaaatttggctttacagaagcacaggcagaagcaattgtttccttgcaattatatcgcttaacgaatacagacattacggcgttacaagaagaagcagatgagcttaataagaaaattattgagctacaggcaattttacaaagtgaaaaaagattacttcaagtaattaaaacagatttaaagagagttaagaaaacatatagtgatgatcgacgcgcaattattgaagatcaaatcgaggaaattaaaatcgatgtagaagtgatgatcccacaagaagatgtcatcgttactgtaacgaaagaaggatatgtgaaacgtactggatggcgctcacataatgcctcaaatggcaaagacttcggtatgaaagagggtgacatcttacttgaacgattcgatacgaatacgacagagacagtcctcttatttacgaataaaggcaactatatatatctgccagtatacgaaatgccagatattcgttggaaagatttaggtcagcacgttgctaatatcgtttcactcgaccgggatgaaacaatcatttgggcaacggttgtaccgaactttgaggaagaaaaacgatttatcgtatttgtaacaagaaatggtatgataaagaaaacagaattaaatcaatataaagttcagcgttattcaagggcattcgttgctgtaaacttgaaaaaagatgatgaagttgtcgatatatttgcgacagatggaacgagtgatatcgttcttgctacacacggtgcatatgcacttattttccatgaagatgaagtaagtccagtcggtgtaagagctgctggcgtgaaagcaattaatttaaaagaagatgactatgtcgcttctggtaaaccgttaaatggtgacaaagatcaacttattctcgtaacacagcgcggtgctgtaaaacgtctaaaagcatcagaaattgaaaaatcaacgagggcgaaacgaggtcttgttattttcaaagaattaaaacgtaatccgtaccgcattgtcggtattgaaattgttcgggacgatgaattagtttacatgaagacagagaaaaacattgtagaagagattgatccgaaagcgtatcgaaataaagaccggtatagtaatggtagcctagtgctagatgttaatgatactggtgaagtagtagaaacgtggacgaagaaaagaccagaataaagagggcatcttgctatgaataatagcaagatgcttttttctaggcaatttattatataaataataataatcttgttataataactgaatgaaatcgttctcataaagtgaaactttaatcaatggggattttctttatccacactgattattagttaaaccaatcgggctttaacgagcagttgattcctcacctagttccttagttttcgctgaattttgagttaggaatcttactgcctgttaaagcgggacaaatggaggggcaacatgaaaaaaataggtgtagggattgtaggatttggtttttctagtacgacatttcatatcccactattacaaacgatagaagaatatgatattcgtgctgtattatcctcaaaagaagaggtagtaaaagaaacattaccaaatgctaatgttgttagtacaattgatgaattggtgaagcgagctgatgttgacttagttgttattacatcacctaatacaactcattttccatatgtaaaagaagcaattttaaacggtaagcatgttgttgtagaaaaaccatttgttgtctcaattgaagaaggggaaaagcttatttcattagcagagcagcataatataatgttaagcgtatatcataatcgtcgttttgataatgatttcttaacaattaagaaattgttaggagaaaacagagtagggaatgtatacgcatatgaatcgaattttgatcgtttccgtccacatgtacgtgatcgatggagagaaaaaaatctaccaggctccggtatattatacgatttaggatcgcatttaattgaccaagcgttatcaatattcgggaaacccgatgcgataagtgcagatgtaataaaacaaagaccaggtgcagaggtggatgattatttccacatagtacttcattacggagttaaacgtgtcattttacgtagtagcagttatgtgaaaaaagctggaccgcattttatagtgcatggagagaaaggttctatcgtgaagtacggtatggattcgcaggaagagcaattaaaaaatggaatgaagccaggtgataacggttatggagtagacgatgaagagaattttgctactttagaaacagaagaaagcttagagcgtattccaacagaagtcggttgttatgacaattattataaaggtgtacgagatagtatattaaatggtgagaaactacctgtaacagcaaaagaaggtttagatgttattaaactgattcaattagcgattgaaagcagtgaaaaaggtagagtcatttctataaaataaaaagacacgaaattcgtgtctttttattaggaatatgtgaatatgattaattatttagtttagtcgtttatcatacattaattggatttgtatgccataaggatcttcaataataccatatgcttcactaaatatatttttttctagcggagagattattttcacatgcttatcggaaattaaattattataaaatctttgtatttcttctaaattagcgctttgaatgcaaagtgacatgttatttccaacgttataacgttcattagtattcattgtatcttctgctatcattagctttgtattcccaatttgtaaaacagagtgagcgatatgttctttattttcacttgtaattttaaaagaacgatctcttttcgccagttcttcatacgtaacaaccattaattttttggcttctaaattacgtgtataaaagttaattgcctcctttgcttgcccattcagtgagagaaaaatagctatttctaatgtcataaatttacaactcctttattagttaataattataatatagactaaaaaggtttcaatacatgacacctttcgggaggtaaatatgaaaaaaacggaacgaataaatgatatgcttattttcttaaataataaaagaaattttaatttaaaagatttaatggttagatatgatatttctaaaagtacagctttacgagatattcaatcattggaagaaataggtgtacccatatattctgaactaggtagaaatggaagttataaaattatagaaaatagtgtgttatcgccaatttattttagtgtggatgaaatgtatgcgttatacttttcgattcttacactaaatggatacaagacaaaaccatttaatatagaaagtattgcgcttgaaaataaatttaaacatgtactacctgataatgtgagtaaaaacatttcgattatggaacgaacgctttcctttgaagtaacaaatcatagtaattttagtccgttcttaaaagaaattttacaggggatttttgctgagcgagtttattatttaacatatttaaaaaaagatgaggagaaagtattggtcgcccaatttattcgaatcgaatctaaatttggccagtggtatgctaaaatctttaattttgagacaaatggtgttcaaataattagatgtgataaaattctttctattgaggaaacaagcaacacgaattcaaaaaatcttgaagaactattaagttatcttacaaactttcacagaaaacctgatgcaattgattttagcgtcattgttaatcaaaaaggaaaggacatttttgataaagagaattatccttccatgaggatacaaaaagaaaatgaaaattatagtataacaggctattttaacaagcaagaagttgagtttatttcaagttattttctaaattttggtgaaacgattatttcaattcagcctgtgatgctaaaagagttaatctataataaggtgttatctataaagcagcatttaacttctttaagataaagttagttttagtcattttttgatatgaaaaagcccttgcgatttaaatatccaaagggctttttgatgattttatttgttctttagaaaaattacttttgtggaacagaaagaccatagaagaacatcgtaacgatatcttttatatgtttttcccaatctccttcaagaagttgtgctccaaattcatcacctaattttgtaaacatttgaatgtaaagtaacatcatttctttagtaaggtgtggattaatttcgtttttgcgctgagctcgttctaatatttctaaataccagggtaggattttttcattttgataactataaataaacttacggagttcttcgtccctttgcatcatttgtagtaacatatcaggttgaaataatccgccagtattcatttttcttacaatcattttttgcatcatatcatgaaaaggtaatttttcttctgcaagctctttataatattgaaattcagatatgataaattcttgtataagctccctaaataacgcatctttacttccgaaatgattataaattgtaacttgagaaacgtttgcttcttttgcgatatgttctattttcacttcattaaatccacgttctgaaaataataagaatgctgcttctttaatggcacgctttttcttttcttttactctttcaaagccgttcaatgcaatcacctcacttaaaatatacaagaaaaaataatggaaaacaataattttgaaatatagactgataaatatttcaaaaagttgttgcgaatatgaaagatgaggagtacaataattttgaaatatcacatattaaatatttcaaaaaatgaggtggaattatgatttcagttcaagatgtcacaaaacagttttcgaatggaaaaggtttgtttcatattacatttgatgtaaaagagggagaagtatttggttatttaggaccgaatggtgccggaaaatcaacgacgattcgtaatttaatgggatttataaaaccgacagctggtaaagcgacaattttcggattagattgttggaatgaagcagcgaaaattcaaagggaagttggttatctaccgggtgaaatttcttttattgaaggaatgaacggattagagtttttaaaattaatgcaaggaatgcgtggattaaaggatacgaaaagacgagatgaactgatagagcgtctgcaatttgatgtgaaaacaccgattcgcaaaatgtctaaaggaatgaagcaaaaagtagggatagtcgctgcatttatgcacgatccagaggtgttaattttagatgaaccaacatctggacttgatccacttatgcagcaagtgtttatagatttaatattagaggaaaagcaaagaggaaaaacaattcttatgtcttcgcatattttcactgaaattgagagaacttgtgacagagtagctattattaaagatggtcgactcgtaacagttgaaaatattcacgatttacaaagtatgagaagacaagtgatagatgtaacagtatcatcacaagaagagattgagtctcttacaaagtgtaatttgcaatttgaagcggtaaaaggcagagaggcatctatcattgtacaaggaaactatcaaactgttttacaaacactttcaaactacaatgtaacggcacttcaaacgagagcgatggatttagaacatttatttatgcattattacgataagaaagaagggataacgcatgaataagcaattatttttagctagtttgaaagaaacacaaaaaagtattttgagttatgcgtctggtgcagctttatatctgtggttattaatttggatattcccgtcaatggtatcagcgaaagggctaaatgaattaataggtgccatgcctgatagtgtgaaaaaaatcgttggtatggaaagtccgattcaaaacgtaatggattttctagcgggcgaatactatagtttattgtttattatcattttaacaattttttgcgtaacagttgcgacacatttaattgctcgtcatgtagataaaggagcaatggcatacatgctagcaacacctgtatctagagtgcaaattgcgattacacaagctgctgttctcatattgggacttctgattattgtatctgttacgtatgtagctgggttagtaggtgcagaatggtttttacaagataataacttaaataaagagttatttttgaagataaatgtagtcggagggctcatatttttagtcgttagtgcgtattcatttttcttttcttgtatatgtaatgacgaaagaaaagcactaagttattcagcgagtttaactatcttatttttcgtattggatatggtagggaagttaagtgataagttagaatggatgaaaaacctatcattattcacgctgtttcgtccgaaagaaattgctgaaggatcatataatatatggccggtaagcataggtttaactgctgtagcgctttgtatttttatcgtagcgattgtagtatttaggaagagggatttaccgttatagagtagaaagtccactgagaaagtgggctttttttatttgtaaatttaaactagtatgtttattgcatccttataaaggatatttatctttttaattacaaaaatattcaaaaaagtgaacctttttctaggttcatacgtctaatacatgtaaagttaaattggaagtgatgaagtgaggatgaagcaggaggagcgattgtgaaagtaatccctttatataaaatggttataaaagaagaaacggatgtttctttagcgaaaaaaggtgatcatgaagcctttatagcgcttatacatacagaaaaagtgaagatgtatcgaatagcaaaggcgatgttacgtgatgagacaaatatagaggatgcgatacagacaacaattttaaaagcctatgaaaatataaaaaaattaaaaaaagaagaattttttcacacttggttaattcgaatactaataaatgagtgtaacaatattattagagcgtataaaaatgtaattgtgacagaagagaatgattacaatatgagtgcgtgtgatcagtatgaagatatagatttgtgtaatgcgattcaatcgttacatgaagaattaagagctgttacggtgctttattattatgaagatatgaatcaagagagtatagcaaagctgttagaaataccgaaaggaacagtgaaatcaagattatcacgcgcgagggaacaactacaaaaacgattaaagatggaatagggggtgtaaaggatggataatgaaaaattatttgatgagaaattaaaaaagagaatcaaagatgaaaatgttatagtacctccagagttaaatgaaaagattaatggtacgctacataatcttaaggtaaaaaagaagagttacaaaattcatatgatgataattagtgcagcggtttgtatactttcagtggtatctatgtctgagttttctatacaaagttttgcgcaaaatggtggagtatttgaatatgtaaagaaaaaagcgttttctgattatgaaaatgaagaagaaataaaatcgaatgtacattatccagataaagaaaagattcatcaaaaaatgctagattctattgattattttaaaaatatttcaggacaatttgaggaatattctagctcatcaagaattgctacaacatataagtatgcgattgatacggagaaacaaagaggtatctcttcgaaagaagataaactagccaaaaaacgaacaattatatataacgagggcaagaaaaaagagtttgatgatgagaagtatacctataaagagacaaaatggaacccgaaagaaagaaacaatgaactattaaaattaaatcctacggaaaggttagtgagaaaatcagatgagaaaaagagatatgatgatgaatatgtagggctagctaaatatagtattcaatcagaattcgcagatttattaattcgatataaagattggaattataaagaaacgaaatatcttggattagattgttacaaaattgaaggagttataaacatagagatgcctgttagcacctctgaagatttaagagggaaattcgaaatggttgtggagaaaaatacagggattatgttgaaatttcttagttttcaagaaggcttgattcaatattcagttacgactgaatggatacaaatagataagggattgaaagaaagtatgtttcaaaaggatagcgctaaatatgaaaaaatgagaaacatattggatcaatagaaacaggaggagagtaaatggggaatcattcatctttaagagaagagaaaaataagcaaaaatataaaaagaaaaagataacaagtttactactggcggtattactatttggtggaattggctatggagcctatgtatatatgaaaacttctagtcttgtacaaaaatctaatttgaatttagcacgaggtgaaaaatccaatttacgtgagaaatctgtaaagccaattgcaaatcatgtttcacttttaattatgggaattgatgaaaatcaagaacgacaaaaggaatataatggtgcatttcatacagatgcattattgttagcgacttttaataaagacgataaaacagtgaaattaacaagcataccgcgtgatacatatacatatgttccagttgaaaagaaaaaagataaaataacccatgcatatggaagtggtttcgttaaaaatggtaaagatggaggaccgcaagcttctgtggaagcggtagaaaaattgttacaggtgcctgttgattattttgtgaaatttaattttggttcctttactaaaattgttgatgggttagatggtattgaagtggatgtcccagttgaatttacggagcaaaatagtaaagatgaacctgatgcgattcatttgaaaaaaggattacaaaaattaaatggggaagaagcacttgcactagcaagaacgcgccatattgatagtgatgcaatgagaggacagcgccaacaacttgttattgaagcgattttaagtaaattaaaaagtgtaggatcgattacgaagctagaaaaaatagttgaggcggttgatggtgattttaaaacaaatttagtaatggatgatattttatctttttataaatacggtttaaacggttcagttgaaaaaatacaattagctggtgatgatttatacttacctaatggcccaaacgggaaacgtgtatattattataatcctaataaaaaagatctacagagtttgagtaatactcttagaacacatctagggttaagtgaaaagcaaattgaggagaattaaagcagacgaaatgtctgcttttttatttttgtagaaaagatgtttttacatatatgcattatttattagcaataattaaccagtattcaagcggtaaatgagatcgaagtgattaaaacaacgaatgtgtatgaatgcaaaataaggtttgaacaacatatggaatttttatgaatattactgtaaaaaaataattttttaaaaattttcaataataatactttacaaaaattaaaaaattagtagaataagaattagtaagaatcgtctgataaatatatagagaaaaacagaattatcagaaaattctttaatagctatcgtttagaattagggagggtacagaaaatgaaaaagaaaaaaatgaaaaaactaacagcagttgtagtaccggttttggcaatgagcatggcactaacagcatgttctacatcaggcggagataaaaagacaagcacaaactcaagtggagatagcaagtcagagggaaaattagcggcaaaacaagtgttgaatcgaacagtaaaccaagagattccaacgatggattcttctaaatcaacagatacagtatcttcacaaatgctagggaatacgatggaaggattatatcgtcttgataaagataataaacctattccagctgcagcagaatctagcacgaaaagtgaagatggtaaaaaatatacatttaaactacgtaaagatgcaaaatggtcaaatggagatccagtaacggcgaaagatttcgtatatgcttggcaacgtctattagatccaaaaacagctgctgagtatgcatttatcgcattcccgattaaaaatgcagaagtagtaaataaaggagaaaaacctgtaactgaattaggagtaaaagcagtagatgatcttacgcttgaagttgagttagagcaagcagtaccgtacttcttaaacttagtagcattcccatcatattatccattaaacgaaaagttcgttaaagaaaagggcgagaagttcggtatagagtctgatacaacagtttataatggaccgttcgttcttaaagattggaagcatgaacaaggatggcaattaaagaaaaatgatcaatattgggataaaaagactgtaaaacttgaagaagttaacttcagtgttgttaaagaaccagcaactcttatcaatttatatgatagcggtcaagttgactttgctttattaactggagagttcgtagataaatacagaaataagaaagatgaattcggaacatattcacaagtgagtacgtatttcattcgtatgaaccaaaaacgtgatggacaagatacaccattaaagagtaaaaagttacgtgaagcaattgcactatcagttgataaaaagaatttagcaaacgtaattttaaatgatggatcaaaagaagctgacttcttagtaccaaaaggtttagcaactggaccagacggtaaagacttccaagaaacgtttaaaaatggtttaaaaccaaatgctaaaaaagctgctgcagcttgggaagaagcgaaaaaagagctaggtaaagaccaagttacaattgaattcttaaactacgatactggtaatgcgaaaaaagttggcgaatatattaaagatcagattgagaaaaacttaaaaggtgtaacagttaacattaaacttcaaccatttaagcaaaaactaaaattagaaactgaacaacaatatgatatttcgtatggcggatggaatccggattatgcagatccaatgacgttcttagatatgtttgagactggacattctcataaccaaatgagcttctctgaccctaaatatgacggcatggtgaaaaaagctggaacggaattaatgagcgatgcgaaaaaacgttgggaagagttaggaaaagctgaaaaaacattacttgaagaagatgtagcgattgtacctttatatcaacgaggagattcttatgttttacaaccaaatgtaaagggagtagtaaaacataatatcagtccagaatttagctttaagtgggcatatgtgactgaaaaataatagagttgaaaaagcatttaaaagtggcttagctacttttaaatgctttttttgtgagcttaaaatactaatttttagtgtggttaaatagaggagaataaggtgtatagtatgtacatatagtagatgggggataaatcctactaaattaaaaaaaaccaggatatttaaaaaactatttacaaatacgaaaaaaagagtagaataacattagttataattttctgaaaaataaatctttagtaaggggtctctcaagggttggtaatgtacatataattagggagggtacaaaaatgaagagaaaaaagatgaaaaagttaacggcagttgtagtaccagttttagcgatgagtgttgcattgacagcatgttctgggtcaggtggggaaaagaaaacgactactacatcaaatagtggggaagaaaaaaaatctgatattaaatatgcagcgaaacaagtattaaatcgtacggaaaaccaagaaattccgacgatggatacttctaaatctactgatacattaggttcgcaaattttagggaacacgatggaaggcctatatcgccttgataaagataataagccaattcctgctgcggcagagtctagtacgaaaagtgaagatggtaaaaagtatacgtttaaactgcgaaaagatgcaaaatggtcaaatggtgatcctgtaacagcgaaagatttcgtttttgcgtggaagcgcttacttgataagaatactgcagcagaatatgcatttattgcttactatattaaaaatgcagaagcgattaataaaggagaaaaacctgtaactgaattaggagcgaaggcggtagatgattacacgctagaagtagaattagaaaaaccggtaccgtatttcttaaatttattagcattcccatcatactatccattaaatgaaaaattcgtaaaagaaaaaggtgataagtacggtttagaagcagatacaactgtgtataatggtccattcgttatgtcttcatggaaacatgaacaaggttggcagctgaagaaaaatgataagtactgggataaaaagactgtgaaattagaagaaattaactatagtgtagtaaaagaggttgcaacgaaagtaaacttatatgatacaggatcaattgattttacattactatcaggagagtttgtagataaatataaatcgaacaaagaagaatatggtgagtatgcggaatcaagtacattcttcttacgtttaaatcaaaaacgtaacggacaagatacgcctttaaagagcaaaaaacttcgtgaagcaattgcattatcagttgataaaaaaggattggcaaatgtaattttaaataatggttcaaaagcaacagatcaattggttccaaaaggacttgcgacagggccagatggtaaagattatcaagatacatttaaaaatggtctgaaatataatccgaaaaaaggagcagcagcgtgggaagaagcgaaaaaagaacttggaaaagatcaagttacaattgaattgctaagctatgatgatggaactgcgaaaaagattgctgactatgtaaaagatcaaattgagaaaaatttaaaaggtgtaacgattaatacgaaaattcagccgttcaaacaaaaattaaaattagaaactgcgcaagattatgaaatttcttatgcaggttggagtccagactatgcggatccaatgacatttattgatatgtttgaatcgaagagcccgtacaaccaaatgagttattcaaatccaaaatacgatgaaatggtaggaaaagcaggtaatgaattaatgagtgatgcgaaaaaacgctgggaaacgttagggaaagttgaaaaattattccttgaagaagatgcagggttagttcctttatatcaaacaggaagatcgtatgtaatgaaaccgaatgtaaaaggaattgtgaaacataacatcagtccagaatatagctttaagtgggcgtatgtaactgaggatggcggaaaaaaataaagtgaaagcatttcaaaagtggctgagctgcttttgaaatgctttttagtatgtataagggaataaatctcgttagtctattgagaatcgggtaggtaattaggaaggttctatcggaggaatttagagaggtcagtaagtagtaatacagatgatagtaagagacctcatgctaataagaaaaatatagaacgtagtaatagagtggaataaggggagagatgtttacatatagtagacgggggataattcatatagtagttaaaacaacaagttactataataaaaaaataaatatttagaaaatttacaaaaatactttacaaaatttaaaaaaacagtagaatattaattaataagaattttctgataacgaaagttagtagagaatttctaaatgttaatatcgtacatataattggggagggtacaaaaaaatgaagagaaaaaagatgaaaaaattgacagcggtcgtagcaccagttttagtaatgagtatggcattaacagcttgctctggatcaggagataaagagaaggcaagcacaacaccaaaaagcggtgaaaaagaaggcggaaagctagcggcgaagcaagtgcttaatttaacagagtctcaagagattccatctatggactctgctaaagcgacagaccaagtatcgtttctagctttaaacaacgtaatggaaggtttatatcgacttgataaagataataaagcaacaccaggagttgctgaatcatataaaaagagtgatgatggtaaaaagtatacatttacattaaataaaaatgcaaaatggtcaaatggagaccctgtaacagcgaaggatttcgtgtttgcttggaaacgtgcggtagataaaaatacagcagcggaatatgcatacattatgtttgatttaaagaacgcaaaagcaattaatgatgggaaagcaccacttgatacgttaggtgtaaaagctgtagatgattacacattagaggtagaattagaaaatccagttccttactttgtagaattaacttcattcggaacattctatccgttaaatgaaaaattcgtaaaagaaaaaggtgaaaaatttggtttagaagcagatacaacgttatacaacggaccatttacattaacagactggaaacatgaagaaggatggaaattaaagaaaaatgcacaatattgggataataaaacagttaagttagatgaaatcaactttaacgtagtaaaagatagcggtacacgtgtaaacttatatgaaagcggacaaatcgatcgtgcgggacttacatctgaaatggttgacaaatataaatcaaatccagacttttatacacaaaaaacaccatcaacgttcttcttacgtttaaaccaaaaacgtggtgggcaagatacagtattaaagaacaaagatttacgtttagcgattgcaaaggcatatgataaaaaaggcttaacgaacgttattttaaatgacggatctacaccagcagattacttagtaccaaaagaatttgctaagagtccagatggaaaagacttccgtaaagaaaatggagatattttaaaaacagatgtgaaaaaagcaaaagagcattgggaaaaagcgaaaaaagaacttggaaaagagcaagtaacgattgagctattaaactacgatagcgataatgcgaagaaagtaggagaattcttaaaaggagaacttgagaaaaacttaccagggttaacagtgaacttgaaaaatcaaccgtttaaacaaaaattaaaattagaatcagatttagattatgatttatcttacgctggttggggccctgactacttagatccaatgacattcattgatatgttcgttacaaatggtcctcataaccaaactggatattcaaatccaaaatatgatgaaattgtagaaaaaggtaaaggcgagctattaacgaaaacgaaagaacgttgggatagcttactaaaagctgagaaaatattacttgatgatgctgtaattgcaccattatatcaacgtggtgatgctatcgttcaaagacagaaagtaaaaggtattgttcaccatccggttggtggagactacagctataaatgggcatatattacagaggataagtaagatgaggggcgtacaatacgcccttttttctatgcacttttcttccgtgctcgaatatataaaataaaaaagggagaatcccatgaaacgaaacacatacatcgatttcctagcttattacggaataggaagtgctcatcctggtggctttacgttaacaaaacaattgttagcacaactgccttttaaatatggagcgaatgtccttgagataggttgtggtacggggaaaacagcggcgtatatgacaagggaatttggctataaagtaacaacggttgaaaagaatgaaattatgattcaaaaggcaaaagatagatggttgtttgaagggttagatatacaattaattgaaggaaatgtagagcatttaccgtgtttgaataactcatttgagttcgtacttggagaatcaatcatcgcttttacagacaaagaaagggttatctcggagtgttatcgtgtattacagcaggacggtaagcttgttgtcattgaaatgattattgataggcacattgataagggtgaggaagaaaaaatcgcccaattatatggcatgaaagaactgttaactgagaatgagtgggtacaattatttcagaaagcaaattttaaaagaattacaattgcgggtggtggcacgattgcagaaacaatctctggctatgtagaagagccagaatggaatgtatcctcacatattccgaatgagttatatgaggcgtgggcacagcatgaaaatgtacggcttatgtaccaacacattttagggcatcgtatttttatatgtgaaaaataaagaaaaagagttggctaaaggtagccaactctttactatgttaaatgaaaaataatgcagctaatgtaattccgaagatgaaaccaaatccgagttcaacaccccagccacaaccgccgcctccccagccgccgcaaccacaactactacaaccacgaccaccacatccgcagctgctgaatccaccaccgcatccgaatccacaactatcacacctgctaaggcctccacaaaggtcacaaccaccgtttgcataagcgtcgtagtatccgaaccctgaatcaaaagatgagcgctgttgcaccggttcgatccatacagagttttgtgtcacatcgattattttacctaaatgtatacggccatcacggtcttcaatccgaacaacttttccgaaataacgttggcatgtatcataacatttttgtctatgcatattctttcctccttccgcattacagtaatacgatatgtaagggggacaagtgcggcttgtacgaatgccctatctatcataattgttataggaaaggggaaatataagaagaggatatataaggaggaaaaggcatgaaatctacagatcagtttcagacatacgaagtaccatgggaagattttattgaagcgttacgagaggaaatgaagaagcaagtagggacagatattattgatacagtagtttgcaatttagaagatggttttgaagtgtatacatatgtgcagggggatttagattttgaatataaggaagcgcttgagagaaaatacggaagtgatgcgaagacacctaatgtgttaacgataatgttattagctagtatttataatacaagtgaagagaatatacgcttgcatgcggataataaagagaatccgattgttgaagtgtatgtaaagcaatgaaacacgctgtggaaggcgtgttttttatttgtatgataaaatgttagaaaattgagaaagaaggtgaaggattgggaattaaacatcttaatttaacagttacagatgtaacagcagctagagagtttttagagaagtattttggtctaacttgtagtggaacaagagggaatgcctttgcagttatgcgtgataatgatggatttatactaactttaatgaaaggaaaagaagttcagtatccaagaacatttcacgtaggatttccacaagaaagtgaagaacaagtagataagataaatgaaagattgaaggaagatggatttttggtcgagcctcctaagcatgtccatgcgtatacgttttacgttgaagcacctggtggatttacaatagaagtgatgtgttaagtcaaaaatcaaactttttgttatgtgtttttaaaataaaaagtaggaaaagtctgttttaagtgtggagcttaaacaggcttttttacttatagtatcggatagaaaacgctagaaggaataatattcagttcttataactgtttacataataaaattatgctgggttcgttgtcctaaaatacaagtcatatatcttgtttcctctcataaatttaaacataggaatttgtctacaaaggtggcgaagcctcatcatgaaaatccgaatttgtgccacgttcatgttgtttctatttatatgtttacctttatcagcttttgcaaaaggagaggaggcaaaggaaagggtcgtttcacttgtatatgacgattcgggcagcatgagaaataacgatcgctggaaatatgccaattatgctttgcaaagtttagttgcgctattggatgaaaaagataaattttcttacgttccaatgagtaagccgaatgagccattaaacatttcgttaacgaaggataaaaggcaaacagaaattgagggaattggagcatggaaaacgtatttaaatactccatttagcgcggtagaaacggcgatgcaatctataaaaaaggaagcagatatagatggaaaacgtgaattttggcttattgtattaactgacggggcatttaatgatttagagaaagataaggttggcggaaaagaacaaattttgcagaaattagcccagtttaagaaagaaatggatgcaaaaaagatatcgttacatccagtcttaattacgatggaagaagatttaggacaacaagaaaaagaacaactaaatacgttcaaggaaatatggaagaaagagataaatggtgttacgatgccgtcaagcggagaagatggcattgtaaaaagtgtaaatcaagtggcagcattagttgcaaatcgtgatccattctcctctgttgaatcgattgtaaaaacgaaagtagtggggaaaagagtagagattacaacaccgtttccgttaaagcgtatgacgcttgtacgacaatcgccttctctgcccgattatcaggtcacacaaatttctaaaccattacaattacaatcttctttttccatacatgcaccaggagaagcaaagttgttcggaaatatagttcatataagtacggaaaatgaggaagttattaaaccaggaacttatacgatagaagtggaccgagatattgagaaagaagggttacaagtactagtcgaaccggcacttaattatactgtttctacttatgataaagaggataaggatagaaaaaatgttgaggaaatgtatgaaggtgtgacagctgttattgaagcaaggcctacggagttgccagttcagtcttcttactttcaggcagaagtagaaatagacggaaaacaatatgcaatgaagtggaacgataaaaggcatgtgttttattacgaaacgaagcttggtaaagggttagtacgcgggaaagttcatatgaatataaaggggttttatagacagacgaaagaatttaaaattgaaacagctgagaaaccgaaattatcacttcaaactgttacaaaagattatgaagaaaaagtgacaaatttagagaatagtaaaccgtttattatacaaccacagttagatggtaagccgatgacagaagaggctgtaaagaaactattaaaatctactggtgtcacatctaaacaatcaatcaactatgaaataaagcaacatggaaatcaaatctatgtttatcctcgtccctattactccgacacatttaattttacagataccggcaccgtagaagctaccatcgtaatgcaggattcaaagttacaagaagtaaagaaaaacataacattccatattcaagatgctccgttttatgaaaaatatgcgcttatttttaagtttgtcattcctatcactttattactgttagtagtaggaatcattgttttaggatggattgttcggccaagatttcaccggaaagcactactgtattatgaatgggatcaagaggtagcgaaagattggctatatcaatctgaaccagaattacttcgaaataaatggtggaaccattattttgggatcccatttagagcagaaagaaaaactgtgcaatccgttacatttatagcgaagaaaggttcgaaatctgtctttgtagcgaaagaatcacaagtagttggaatgattattgatggaatgtttataacagaggatgaagtaggaatggaacataagacactatatccaaatgaacttttactaattgatagaggatatggtaaggagatttacaagtacgaatgtgaatagtaggtagggataagaaggggatggagtattcattctctttcccttttttcaaacaagcaagaataggaaggtggttcacatgacattacaagttccaacaatattaattggtttaggtggaatcggtagtactgtgacgcatcaaatatatgaaaaactgcctgaagagcgccgaaaaaaggtagcaatgcacgtatttgatacagatgtgaatacattaagtaaatttgatcatattcgaaagtttaagacacaaacaagttctagtaaaacgcctagggagtatattgcaggagatccaacgatcccagagtggtttccgatggatccgactatacttgataagccattaacagaaggagcaggacagttacgcgttatttcacgtttagcgttacgtgctgcgatgaaagaagataaattgacgtctttttggcaagaaatcgagaaaatttttccggttacaagtgatcaaacggaatatggtgtgcgtgtcattatagtaacatcactagcaggcggaacaggttcagggatgtttctgcaaattgcattatatttacgtgaaatgcttcggaagaaattgcagcatcataacattttaatacgcggtgcgtttttaatgccggatgttttagtaaagacgagaacagttagcgcgaaagaatttgaaacggtgcaagcaaatggctatgcatcgttaaaagaattacatgctattacgctcggttctactggagaattatcaaaacgcggcggtgtaacaattgaattagagtatcgccctgatcaagtagatgaagacggaagaacgaatcatacaattaaacaacatcatttaccgtacaattattgtttcttatacgattatgaaaacctacatggacaccatttacacaatttatcagattatatggaacagatggcaaatacaatttatttacagttatttagcccgatgtccacaagtcattttgcacaagaagacaatcaaattcagcaattagcagaatcaagcggaaaaggacgatattgcggggcaggaacggcaaaactcatttatccgtatgagcatgtgttaaaatattgtgctttaaaatgggctgtgcaaggtttagatgaatcgtggcttcatttagatcaactgtttcaagagaagaagcaaagatatgaccaagatgtaaaacgtgggatgcagcgtgaaaagccggagagaggtaaaagttatttagaggacttggaacatcttgctacccgtccagagcaagctcatattttctatagacaaatgtacaatgaaacacgtgaaggagcagagggtggtaagctcggagttgcgaaatcaaaactgtttttagaagctgtagaaagttatgtacaacgaacggtgcaaaaagatgaggaattaaatcgtctgcaacatgagtgtaaaatttcagctgcgaaactgaaaatgatggaacaaatgaaaggtgaagtggcaagagtggatcatgcggttcgtttatatgcgtatgcgattccgagccgtgtacatgaacatgtaacgacacttttatatgacatgattgaatcagaccgcttttcaccaagtggttctgaagggcagtcctatcaattaaatacatggtttttaaagaaaacagatccagttcacccagtagcagcacgttttatgttatatgaaattcgaaagcagttagtggaaaaaatgaatcgactacatgaaaataatgaacaaaagcgaaatgtaattcaaaactacgataaaaaatttaatgtgggtaatatcgatggaacggtaacggctgtacgccgagtagaaattgctcaacaacaaggctggtttggaaaaatgattaataatcagcaacgtttattcaaaagagaatttgaagacattataacgcaatatgtacacaaattaaatgaatatcgaaaagaaatgctattagaacttgtatatcaatcgctatatcaagcagttaataaaatgattcaatattgggaaagattttttgataatttacatgaaacacgtgaaaatttactgtttgaaatccaaaagcgcagtaaggaatttgaagggaaaacaaacccgacgaatgtatatgtattagctgaagaacagctgcaagaaaagatatggcaagatatgcagcaacatttaaatttaggtgtactaccgaaagatatatcagcggaaatttatatgagtttgtacggggaatattgtcgtgatgcgaaaacagaagagattcagtcgaaaaaggtagaggatttctaccgagaacatatactgagctattgttatgacgaactgcaagtacgctatcgtgataaattagaactgaatatcattgaagcgttgcgaaaagaagcagattataagaaacgtgatcgcgatgaatacgttcgtgaaaaaattgaagacctgttccatttagcgagtccattcgttccgaaagttgctcatcatagggaattacaatattggggtatacatccttctttaaagaaagagctgcaagaggaattaattcaagaaatgtttaaagaaaaagatacagtacatgaagccttttcgccatttgaagtaatctgttatcgagcgcattacggcttatcgctgcaagattttcctaaattatcatcaggacatatttcaaacggatttatgaatgataaaggtgactatttccaatcgtattatcgccgtgtaaataaattaaatagtaaaaaatctagtttaacgccgcatttagataagtattggcacttaccagcctttatgccagatttaaacgcgactcaaacaaaattagattatgataaatgtaatcgtgcattactatacgcatatatgtatcgctggattagtttagttgctgttgatggacaatttgtgtatcaatataacggtgtaggacgtagctttttaattcagtcgatggggaaaaatatttcaagcgaaagttataaattacacagagcattgcttcataatccgtttatttatgaaaacatcttgtcacgatttgaagaagagcaagaaaaggcgatgatacaaggtggacatttatatacacatccgttcgtattaggagcccaagatgtaagatggcttagaaaagaacatgtccacaatcttttagatatgattttaatgtatgaccgtgaagcgaagtatgatccgacattagaagaaacatcagatgaattattaagactattcctcgatgaaatcgagttgtatttccagaactattacggtacaggtgccgatatggtggcaaagaaagagaaagaaatgtttattaaacaattgtgggatcgctcgcatgcaaaaggatatgtagatccaaatagcgctccgtataaaaaatggcaaaatttattaagtgttcaagatgaagaagaaacgccaaaaacgaatgtataatgaatgaaaagggaatccttaaaagtggcaatacaactttagaaaagagggattctgatgccgtttttaggaagtgtatatcaaatatttgggttatatccggaactttattatgggatgatttcagcagagttgcaagaggaagctcagaaggagcatcttgaaaatagtagtgcagaagctgaagtggaagaataaaaaaaagtgcagatgaaaatctgcacttttttgttagtattaaaatggtgacataacctcaaatgaattattatttttgaataataattcatttgaggttattatgattttcattacattgtatgtaatgaaaattgtatgaaaatcaatgtaataaaatgcatatgaatattaaggtggaaaacaacaatgtttttgagaaaataattatgtataaaaataacatttgatacataatcagccgattatttttgagtgatttattattgacaatataattaattgtatgataaattcaatcagcattcttaatggttttttggtatggttaatattttgaaaattcaatacggtataaagagattgatttttctgtttttattgagacgggttactaagtctataggggaagtgaactatgtatatttttatttttaaaatagaacagtaataaagaatgtaacaagtaagagataaacttgaaaaagaggtttcaaagaatgagtcttttcataaagaaagcaatggatgaagaaaagaaaaaagtattgaatcaaactttaggagcgattgatttaactcttttaggtattggagcaattattggtacaggtattttcgtattaactggtattgtagcagcgaaacatgctggtccggcgattgtattatcttttgtattagcggcaattatatgtgcatgtgtagctttctgttatgctgaatttgcatctacagttccagtttcgggaagtgtatattcatatacatatatgacactaggtgagatttttgcatttatagttggctggtgtgttatgctggagtatttattagcgacttctgcggttgcagcaggctggtcagcatattttcagtcattgctactaggttttaatattcacattcctacggtttttgcttcggcaccaggaatggggaagggtggaatcattgatttaccagcagttcttattattttagttgttacatttttattaagccgtggtgcaaaagaaagtgcacgaattaataatataatggttattattaaactggctgttattgtaggatttattgttgtagggacacaatatgtaagaccagagaattggcaaccatttctaccgtttggttttcacggtgtggtagggggcgctgctactgtattttttgcttttttaggatttgatgcagttgcaacagccgcagaggaagtgaagcgtccacaacgtaacgtgccaattgggctacttgtttccttgttcatttgtaccgttctatatgtaggtgtttcattcgtgctaactggaatggttccgtttacggaattaaatgttgctgatccggttgcatatgcgttgcgcactgtaggagaagatagaattgctgggttgttatcggtgggagcgatagcagggctaacaacagttctgttagtagctatgtttgcatttgttcgtgtatcttactcgatgagtcgagatggactgttaccaaaaagactttcaagtgtccataaacgtttacaaactccattttttaatacgtgggttacaggtatactagcagctttattagcgggattagtggatttgaatttattagctaatttagtgaatatgggaacgataacagcatttgtgtttgtatctatagctgtcattgtattaagaaagacacatcctaatatgaagaggccattccgtgcccctctagtaccttttttacctatcgtttcaatagtaagttgtatatatttggcattgaacctttctaagcttactttaattagttttgtggcatggattataataggggttttcatatattttgtatatgctaaaaaacatagtaatgttagaaatagaaataaagtatagtccattgaaataatacttgtaatggaaatgaaaacacgctacttattcatataagaacaagtagcgtgttttttctatttaataatcccattttctaaaattttaatagttggtgccactttcacattagcttttgaaaaggcactcggccaatcaacttcgacttgtttccattctttatattgaaacgctctcgcataatcaccaaatccgaatggatcaagttgctgtttttgaatgttgtggattaaatcgttcaaatctttgtttagttgttttgtaataagagaagttaatttctttctatctttgtctatatccatattgaatgtaagttcagagacagcaattttcaaatccattttaacatgaaatttgaagtggttatcgctataatctgtatggatatcacgatccatgctaagaacatttattgttacgaaatcgccgccatcggtatcttttaaatcactattactttcaactgaagtagaagggattttcaatgtaagcgaaaccggtgtattcgctttcttttgtaacaaaagaagaagggcgctttcataacgatttaatgacattttataaattccgcgagaagttaatagcgcggaaccagtaacgataacatcctttttacctttttttatttctgaaatagcaggtgttatacctttattaaacgtttgcctgtgaaattcatggaatgtcgtaaaaacggtccgattgtacagtttgttcgtattaattaaatctgttaaatactcgggaagggcaggcttatctttaaagttattatatataactgaagaaattggaccgtctactgcaaccatgcgcatgtttccagtgtttttaggatcacgataccaaacatcaaggtaaggcatagccccttcttgttttaaaaaatttgtgctaaataaaatgagctgtaacttttctgtagatactaaaccgccacttgaactattaaacgttgcttttgcttctcgaggtgtacgtactttcgcttcatgtgtttcgtactttttttctacgtcttcattaaaaataggatttacgtggtacacaattaattttccttttgcttttgcatcaaagccgtaaattaatgaaatcgattgtttttctaagtcgagtcgatctccacagcctgttaaaaaggttatgagaaagtaaagtatagtgaaatgaataaagcgcctcatttaaactctgctccttttccaatgctgataaagtgtcatgtataagagaaatacgaccgggaatagaaaaacgataaaataacttgcagttccccaaaattctcgcaacgcacttatttggtaagaggaagggatataaaagaataagatgaagatacacccgaataataaaccataaataggtaatgaactcctttttttgttaagtaattgattgattccatctgaagcagtaaaaatataaggaatgcaagaatcaaaaataataaagagataaaatgacaaaaagataatttcaaatcgctcaagaaatgagaagtgaaatggtgtaacgagagaaagggtaggccataaaaacttagttataccatctgggctaaaataaaggaaagaaacgaacgtcacttgcaggtaaacgaataaagtaatcaaattcgcaagaacaatccctttttttgcagatgatttattactgaggtaaggataaaggacgaatgcaaactcaaatccgagaaaggcaataatagttgattttactgtgttgaaaactggtatccatccctctttaaggagaggaagaagatagatccaatgcccatctttaagtgggataaataatagtaatggcatccagagtgtaaataagacagtaaaaacagcatagcggctaataataagaacacctttatatgcgagcattaccattggaatagataatagcatcatgattaaaaacattggagatctaggcaaaatccaaatgtgaataacgtataagagggaaaaaattaaagaaaccgctgcaagaacagcatataaaatccaaaaaatcattcctactcttcctaaccattttccaagataacgagttagcacatcaagtaaatggtaaccaggatgcttctccatgatttttacaatacatagactgaccctataataatagacatccagccatctgtattcgccccttgggccacttcacgtggcagtgtaagtacaccgaatcctacttgaacaccactaatcgttaaaatgtattgaaataaactaatctccctctttacacgctttgtcacttatcttcctccttttcttctatatccggttgtcgattttcttgttttaagttaagggatagtggtcgtttcttcattagtttccatggcaaacgcacaagaacgtcttttaaatccgtagcaaatgatggagaaaaaggactaccgtaaggaacaccaagtgagtccatagaaagaatatggatgatgataactgacattccaaccataattccaatgactccgaataaagaagcgattatcatcattggaaagcgaagaatccgaactcctgctgacatttccagattgggaatgataaaagaagcgactgcggtaatagatacgacgataaccataacattacttacgattcctgcttgaactgcagcttgtccaataacaatccctcctacgacgccaattgtttgtccgacgggaccgggaagtcgaactgcagcttcgcgtagcatttcaagtactaattccatcaaaagtgcttctaatataggcggaaaaggaattttggctcgagattctccaattgttaacaataatttaagtggaattacttcataatgaaaggaaatcatagcaatataaagagcaggagcaaatattgcaataaatagtccagtgaaacgaaggagtcgtataaaagatggaatcataggtctgaagctgtaatcatctatcgtctgaaaaaaggatgaaaaggtcataggtcctattaatacgcctggtgagcgatctacaataacggcaattcgcccatctagaatatgatgtgttgttgtgtcaggacgttcagttattgataattgcggaaagagagtaaaggaattatcttcaacaaatccctctaattcaccagtagtaagaatcgcatcaacttttactgactcgatacgggatgccatttcttttacgacattttcgttcgcaacatctgctagataaagcaaaaaaacctttgaagtagctcgttcaccaacagtgaattccttcactttcaattcgcgatttggaatatatcgacgaataagtgcaaggctgtcgctcgctacttcattaaatccttcgtgtgagctttttatggagctctctgttgtaggttcttcaatgctcctttttggtgccgcttgcgtatcaagctctaaagcggatagttgcccgtttataaataaaatacttttgccgtgtaaaagagattgttcaatgtctgtccactgttgaacttttttaatatttccgatagaaacagaggcttcccaaaaatcgtcttcattccactctttaaataagagaggacgaagaatgtttacgttaataacagttttgtctacaagtccttccatatatataagtgcagcttcctgtccgttttttaatggaaaagtgcgtgttattaattctggaataccgctaaacagtttggacaagtgctttaaattaagggaaagggaagaagagatagatttatttaatgtgtgattagcttgctcttgggtagaaaaagatttttcaccacgaatccatttattaaaagaccccatttgttcgcttactccttgttatgttttatatggattattatggatagttacaagctgacatatgcgtagtttaaattttatattgtatatttttaactttaacgctataattatagtgttaaagatggaatcgtgatatgacctgttatgaatctatcgttttatttatgaataaatggattggtattttagcaagatgtgctaataaactactccaccatgatgatagcgtgccaaaaatgtggtgcgtatattttcgtggtggagtttttttattctcaaaaagggggaaagaccatgaatgacaacatggttcatattacaattgacggaaaaaagtatacagcggagcctggttcgacgatattgggtgttattaatgagaacgggattgaacatccgcaaatttgttacgtgccagaagtagatcctattcaaacatgtgacacttgtattgtagaagttgacggaaagttaatgcgttcttgttcgacgatagcaacggaaggtatgaacattgaacgtgcttctgttcgcgcaaaagaagcacaaacagaggcgatggatcggttactagaaaatcatttattatactgtacagtatgtgacaacaacaatgggaactgtaaactgcataatacagcagaattaatggaaatcgaacatcaaaaatatccgtatgaaccgaaagtagatgtaagtgaagttgatatgacgcatccgttttatcgctatgatcctaatcaatgtattgcatgcggtcaatgcgttgaggtgtgtcaaaacttacaagtaaatgaaacgttatcgatagactgggaagcggaacgcccacgagttatttgggataaaggagtaaatattaatgattcttcatgcgttagctgtggtcaatgtgtaacgatttgtccttgtaacgctttaatggagaaaacgatgctcggtgaagctggatttatgacgggattaaaaccagatattcttgaaccgatggtagatttaattaaagaagttgagcctgggtatagcggtatttttgcggtatcagaagtggaagcggccatgcgtgatactcgtacgaagaaaacgaaaacagtatgtacattttgtggtgtaggttgttcgtttgaagtgtggacgaaggggcgtaaaatccttaaagtacagccatcttcagatgcaccagttaatgcaatttccacttgtgtaaaagggaaatttggttgggatttcgtaaattctaaagaacgaataacaaaacctttaattcgtaaaaatggaacgtttgttgaatctacatgggaagaagcactgaatgtagttgcaaataaattaggcgctattaaagaagagtacggtaaaggttctattggatttatttcttcctctaaaattacaaatgaagacaattatgtaattcaaaaattagctcgacaagtatttggaacgaataatattgataactgctcacgttattgccaatcaccagcaacggatggtttgttccgtacaattggtatcggcggtgatgccggaacgattaaagatattgcgcaatctggtcttgttattattgtgggatgtaatccgacagaaggtcatcctgttctagctacacgtattaaacgtgcacataaattacacggacaaaagttaattgtagctgatcttcgtaaaaccgaaatggcagagcgatcagatgtctttattagtccaaaacaaggaacagatcaagtatggttaatggctgttacgaaatatatgatcgatcaaggttggcatgatcaggaatttattaatgagaatgtaaacttctttgaagatttcaaagagagcctagaagaatatacacttgaatatgcagaagaagtaacaggtatttcaaaagaaacacttattcaaatggctgaaatgattcgtgatgcagatggtacatgtatcctttggggtatgggggtaacgcaaaatacaggtggttctgatacttccgctgcaatttcaaacttacttcttgcaacagggaactatcgtcgtccaggagcaggtgcatacccacttcgaggtcacaataacgtacaaggtgcttgtgatatgggtactttaccaggatggcttccaggatatcagcacgttactaacgaaatggaacgtgcgaaatttgaaactgcttacggagtgaaaattgatagtgaaccaggtcttaataatattgaaatgcttcacgcaattgacgaaggaaaaatgaaagcaatgtatcttgtcggagaagatatggctcttgtagattctaatgcaaatcatgtacatgaagtgttatctagccttgatttcttcgttgtgcaagatgttttcctttctaaaactgctcaatatgcagatgttgtattaccagcagcgccatctcttgagaaagaaggtactttcacaaatacagagcgccgtgtccaaagattatatcaagttcttcctacgctaggagacgcgaaaccagactggtggatcgtccaggaagttgcgaataaactaggtgcaaactggaattatagccacccaagtgaaatctttgctgaaatggcaagtttatcaccattgttctcgcaagcgaactatgaagtgcttgaaggatggaacagtttccattggggaagttttgatggaacaaatacaccacttctgttccaagatggatttaacttcccagataaaaaagctcgttttgcgattgctgactgggtacgtccagctgaatttccagctgagttcgaccttcacattaacaacggtcgtatgcttgagcatttccatgaagggaatatgacaaataaatcaacaggtattcaaacgaaagtacctggtgttttcgttgaaatctctccagaccttgcaaaagaacgtggcgtaaaaacaggttcgttagttcgtcttgtctctccttttggagcattaaaattacgtgcactcgttacagatcgtgtaaaagcgaatgagttatatttaccgatgaactctacagataacgaaacggcaattaatttcttaacaggtcctgctgtggatgtacgtacgaatacacctgcgtataaacaaacgaaagtgcgtatggaagtgttagaagttgatggcgaaaatccgatgccaaaagcgaacccacgcaataaaaaacgtcaccctcaagctggcattgaggtacatcgtaagtgggcacgtccagggtatgtgcatttaacggataagtaggaggagaaaactatggctgcacctataaaaatgattcaaaaacaagaattaactgaggaagaaataaaacagcaaaaattagatgatttaaaggagcttttaactaataatgaagaagctctaaatcagatgtttaatatagtaggggaattaaatgacattggaatgctagaagctgcaaattctatgctgaaagcgaaagaaccaattgcaaagatcgttctaggtcaagtaactcgtgagcctgttacaaatttaattaataatatgatgggtgctgcaggggcgttaactgaacttgacccagaacttacgaaaaagcttataggtagtttattagtcgggctagaagaaggtaatgaacatctagaaagtaataaaaaagtaggggtattcgatcttatgaaagtattgaaagacccagatattaaccgtgctatcgggtttgggcttcatttcttaaaaggtatggggaaagggttaaaagacgaataaacttcatgaagtgaacctttccgcctaaatatttgtacgaaatagtttgggcggaaggctcattttggtaaaatatataataaagtaaaatgaggcttttgggaggtatgattgtatgtcaaaaaaagtacatgaatttaatgatatgatacgaaaacttcgaaaagaacttttcggaaaaggaccagaacgaattcatactgtttttgcagaaaatatggctatagcgactctttatggaaacttaacacctactgaaaaatttatttcaagtacgatggacggtgcggaaatggttcatatggctagaacgaaaatgattcaagaggtgtatgctgtgaattcacgtgaacatttggaggaacttgttggagcgaaattagtgaatttgttttcagatatgaaagtagaagaagatattgcagtttctgtatttgtttttgataaaaatataacgtgagagaaggatactgatcgtgaaaccgatacaggtagaaagagaaatctttcgttatgaacaaggagcatttaaacatatagaggacagcattgtaacagagtttcctgtcaccattaaaatgaacggacaggagtttgttacaatggttagtactccagaatatatagaagatatggtaataggcttcttagcgtctgaaggaatcattcggaagtatgaagatattgatagtgtatgggtgcaggagaaagaaggatttgtgcatgtaacaacgacaaaagtaaatccgtattatgaacaaatgcaaaataaacgctatattacgtcttgttgtggtatgagtaggcaagggtttgtttttgcaaatgatgcactaagtgcaaaaaaaatgaagggtgtccatgtacaggttgctgcagaggattgttttcggttaatgaaagaaatgcagcaatctgcggatacgtttcatcatactggtggggttcataatgcagctttatgtgatgtgaatggtattattttaagtcgaatggatattggtaggcataatgcattagacaaaatttacggttattgtttaagaaacgatatttctataaaagataaaatcattgtttttagtggtcgtatttcttcggaaatattattgaaagttgcaaaaatcggttgtgaaattatactatcaaaatcagctccaactgagttagctttgcaactagcggaagatttaggtattacgacaataggatttattcgtaatcactccttaaatgtatatacccatccagaacgtgttttaaatataaaataaaagtgaggcaatgaagatgaaatcagttacattagacaagttgcaacgtccgttaaaggatttacgcatttcagttactgatcgctgtaattttcgctgtcgatattgtatgccagaagaaatatttggtcctgattactcgtttttgtctaatgataaaattttatcttttgatgaaattgaaaggataacacgtattttcgtttctttaggtgtgagaaaattacggattacgggcggagaaccgttacttcgaagagggcttccaaagcttattgagcgccttaataaaattgatggtgtagaagatatcggtttaacaaccaatggatcgttacttaaaaagtttgctcctgatttatataaggcgggactatcacgtgtaacagttagcttagattccttagaagaagagcggtttttctatttaaatggtaataggagcaaagtgcaaagggttctggaaggaatacaggctgcagctgaagttggaatgaaaattaaaataaacatggtcgttcaaaagggaaaaaacgaacaggacattttgcagatggcgcaatattttaaggaaaataagcatattcttcgttttattgagtatatggatgttggaaattataatggttgggatttaaaagaggtcgtctctaaacaagaaatagtagatacgattcatcaagttatgccgttagaacggatagaagcaaattattctggtgaagtggctactaggtatcgttatataggaagcgatgaggaaataggtattatttcatcagtaacagattctttttgctcatcatgtacgagagctcgtatttctgcagaaggaaaattatatacttgcttatttgcttctaaaggaaatgatttaagagaattgcttcgttctgaacatacagatgaggacattacagatgtagtacgcgatatatggaataatagggaagatcgttattcagatgaacgcttaaatcatacaaataagaaaacaatacctaaaattgaaatgtcacatatcggtggttaatatataaagctagcttcatagtgaaaaatggaaaatttacaagagttgtggattttctattttatagtaaaagtgatgattgatatctctgtaaaagatgtgcagagaaattaagcagcattcaaaaacctttattttgaggaggttttttgaagctgcttttttatttggagaaaatggaggaatgggtaatggcatttcataagccggaacaaattgctgagcttgtcattgaggccggtgttcaaaaagtaagacagacattgccagcgatgcttattctcggttttttaggaggagcgtttattgcgataggttttttacttaacattcgagttttagggaatttacctgagcgctggggaagtctagtgaatgttttaggaggagcagtatttcctgttggactcatgctcgtagtattagcaggaggagaattaattacgggaaatatgatgtcactgtctatggcgctttatgcaaagaaaattacattgataagcgtactgaataactgggtttggattactctcatgaattttattggggcaattttcgttgcgtattgctttgggcatcttggcggattaacagagggagagtatttaaataaaacggtagcgatagcggaagggaagttacatgaatcatttgggagaactttaattttagcaattggttgtaattggctcgtttgtcttgctctttggctcgcttacgggacgagtgattttgtcggaaaaatcatcggaatttggattccaattatggcatttgtagtgattggatttcagcaagtagtagcaaatatgtttgtcatttccgctgttatttttgctggtcatctaacgtggatggatttggctaaaaattttgttcctgtttttatcggaaatgtaattggaggagctgggtttgttggttttgcttactttgcttgttatcagaaacaacattctaatatgaaatagagttcttgagaggaagggtatgtaatggctgatcggtattcacgacaacagttgttcaaaccaattgggagtaaaggacaagaaaaaattcgaaataaacatgtgttaattgtaggggcaggcgcattaggaagtgcaagtgccgaaagtttcgtacgtgcaggtgttggcaagttgacgattattgatcgtgactacgttgaatggagtaatttacaaaggcaacaattgtactctgaacaaaatgcgagagagaaaatgccgaaagcaattgctgcaaaaaatcggctagaacaaattaattcggaagtacaaatacatgctttcgtaatggatgcaacttcagaaaatatggaaggtctattaaaaaatgtagatgtaatcattgatgcaacagataattttgatattcgatttgtaataaatgatttatcacaaaaacataatattccgtgggtatatggttcttgcgttggatcgtatggtatgagttatacaattattccacaagagacaccgtgtttacattgtatgcttaaaaatattcctgttacaggtgtgacatgtgataccgctggaattattagccctactgttcaaatcgtcgcagcatatcaagtggcagaagcactcaaaattttagtggaagatttctcagcaattagaaaaacatttttcatgtttgatatatggagtaatcaaaatcattttataaaattagggaaaataaaaacagacgcttgtctctcatgcggttcaaatcgaacttatccttatttattatacgaaaatcaaacgaaagcagctgttttatgcggaagaaatacagttcaaattagaacagtagacaataggaaatacaattttgatgatatagaaaaagtattacaaaaactggggaaagtagatcggaatccgtatttactatcttgccaattcgatgattaccgcgtggttgtttttcgagatggtcgtgtttttattcatggtacaaatgatatttcgaaagcgaaacaactatattatcgcgtattcggttaatagagagggtgtcaacaatggaaagaagagtgccaattacggttgaagaagctgttcgtaaagtgatgggatttgctgataaaggcttaaaggagctattaccaattgaattagcttatggacgtatattagcagaggatttagtagctgaccatgatgtaccgtcatttaatcgttcgccatatgacggatttgctattcgagcagaagatactaatttagcaagttatgaaacgccaattgtatttgaagtagtgggtgaaattggtgcaggatcgctattccatgagaaagtagctccgtttcaagcagttcgaattatgacgggagcacaaattccgaatgggtgtgatgcggttgttatgttagagctgactcgtcaatatgagaagaatggcaacaattatatggaagtgaagcgatcattcaaaaagggcgacaatatttcttttcaaggtgaagatgctcgtaaaggaacggttcttgcaaagaaaggatcgtacattaatccaggtatttcagctcttcttgctacattcggttatagtgaagtaccagttgcgagaaagcctgtaattggactgttagcgactgggagtgaattactggatgtcaatgattcattacagccagggaaaatccgaaacagtaatacgtacatgatattgtctcaaattcgaagagcgggcggaagagtaaaatattttgggaagtttagtgatgattttaatacgtgttttacagctgtgaaagaagcgcttggccaagtagatatgttaattacaacgggcggtgtatcagtaggagattatgattatttaccagctatttacgaaaagttaggtgcatctgttctttttaataaagttgcaatgcgaccaggaagtgttacgactgtagcacaattaaatggcaagttattatttggtttatcaggaaatccatcagcttgttacgtagggtttgaattattcgtaagaccgtgtattcggacgtatatgtttagtgaaaaagtacatttaaaaagagaaaaagcgttattaggagaagattttctaaaaccgaatccatttacaagatttgtacgagcaaaattgcaatatgatgaggggaaattaatcgcttatccatcagggtttgataaatctagctcagtttcttcattggcaaaatccaacgcgtttatcgtattgccgggcgggacaagaggatataaaaaagatatgtttgtcgatgttcttttattagaagataacgaaggtagtgaatggccttggacatttcataaagtgagaggtggttttaatggaacaagtgctatttgagattgtagataatccgattttagttgaagaagtaacgaataaagtcgcaagaagagaagcaggtgcgattacaacatttattggtacggtgagagaattaacaaaaggaaaacgaacgctacatttagagtatgaagcatataaaccgatggcagtaaaacaacttatgagaattggagaagaaatttgtgaaagatggccggatacaaaagtagcaattacgcaccgtgtagggcggctagaaataatggatattgcggtagtcattgcagtttcatcaccgcatcgtaaagtagcttatgaagcgaatgagtacgcgattgaacgtataaaacgaattgttccaatttggaaaaaagaattttgggaagatggaacgatgtggattggagatcaacttgaaaatacaccatatccagaaggaaaaccaaagaaggaagaatgagaaaatgattataattttattgtttgcaaatttgcgtgaggaagttggatcggatcgattagtgatttcagaaaagcaagaaatgacagtgcaacaattaaaagaatggcttaaagccagctattgtttacaatcgttggataaagtgatggtcgctgttaacgaagagtttgtaatgaatgaagagatgataaaagctggagatatagtcgcattaatcccgcctgttagcggtggatgataagttttttcaccagatgaagcgccaagaaaatgttgtatataaattagaataagagaagggatgagttctatgcttactcaagaacaaataatgaatgcattaaaacatgtagaggatccagagttacacaaaagtgttgtagaattaaatatggttagaaatatacaaatgaacggaacaaaggttaaacttgaagtagtactaacaatccaaggttgtccgttaaaagcaaaaattcagcaagatattgaagaatcacttcacgcaattggtgcctctaaagtggaggtaacatttggttctatgacacaagaagaacgtacagctttaacagagaaattaaagaaaaatactagaacagaaactggtatgccgagcatgcttcgcccggattcaggagtacgttttattactgtaacgagtggaaaaggcggagttggaaaatcaacggtgacaattaatcttgcaactgcactagcgcgtatgggcaaaaaagtggggatactagatgcagatatatatggttttagtattccagctatgatggaaacgaataagaaaccaacgatgattgatcaaacggcaattccagtcattagtcacggtgttaaaatcatgtcgatgggattttttacagaaggaaataacccagttatgtggcgcggaccgatgctaaataaatggattcaaaattttcttgcgaatacgcactggggagaattagattatttattacttgatttaccaccaggtacaggagatgttgcgatcgatgttgcagcgatgattccgcaagcgaaagaaataattgttacaactccgcacaatgtagcttcattcgttgcttcaagagtcggtgtaatggcaaaacatacgaagcatgagattttaggtattgtggaaaatatggcttattatgaagaacaagatggatcgaaaaattatctcttcggaaaaggcggcggcgaaatgcttgcagaacaattgcaaacagaagtaattgctcaaataccttttgcgaaacgtgaagaaaataatggttcatctgtatatgatgaagattctcttgttggagaagtgtttacatcgttagctgaggatattatttatagaggatagagggggaagtttagtatggcatgtaacattgatcattctattgaagatgtgatgaataagcttgaaagtcaaaagagttttttatcagaagagatttttaaagggttaaaaaattttttacaaggtaatcactcacaagaaatattaaatgatgtatttcatcttttaaaaaagtatgacttagtaagtgaagaagaaagagagacgagaaataatcaattattgttgattataaaataagtatactttggcttttgttttgtaacaggaggggtaaatggaatggatatgaaaaagatgattgaaatgatagaagcaacaaaagtgactaaagaagaattatcaatttctactttacatcaagagcttgtgaagttatatagtcaaaaaaatgttgctcattataccgagttattaaagtatattttatcattatccgtgcagctcaacctacatcttgtattgaaatattttggcgtgcgaccggttgttgcgacagatgagcgtatgcaatttcaagagatatttaaatgcttagctaagaaagatgagaatggggaatggtttctaaattttgtttctttatatgtagggctaattgtagttcttcgttttgatgagaaagtgattgagagcaatttttttgatgatatggtagtggatgaatgtaatgaaatataggattctgctcataacatttttctatattaaatgctttaactgcgattttagttggttatgtaaatatgaaggtaactaattaagaaaaaggaatgaaactagttggataaaaagagttcttcagttgtttccgtcgttttttcgtgttaccattaagcgaatttttcataaggagagaaagcgatgaaatggatttattttcttattattaacattatagcttttagccttatggggcttgataaacgaaaagcgaagaagaaacagtggagaacgccagaaagtacgttgtttttatcagcggcagttgggggagcagttggaacttggattggcatgtatatgtttcatcataaaactcataaaaagaaatttgttttcggcataccgttacttgttgtaataacggtatgtttattattcgttgtatgagaaatgtcgaaagaaatgcagattgattattggtaaagtgagcatgtgagaccgtataatggagaaaaaatgagaagaggagaaaaaggaagatggggagtcaatcagcagagcaaaaaaaagggatactatatgcggctggtgcttacacgatgtggggaatcctaccgatttattggaaatgggttgaggaagttccagcagatgaaatattagcacaccgcatcgtttgggcgtttgtttttatgttactcgtattaggtgttacgaagaggtttcgccagtttattggggaatttgtgaatctttttaaacgacctaaattattaatgtcattaacaatagcttcagtcttgattagtggaaactggtttgtttacatatgggccgttaatcataatcatgttattgaagcgagtcttggctattatattaatccgcttattagtattttacttggtacagtcgttttaaaggaaaagttaaacttctggcaatatgttgcagttggtttagctggagtgggggttatcattttaacagtacgtttcggggctatcccgtgggtttctttatcacttgccctttcatttggattatacggattaacgaaaaaattgttaaactatgatgcgacaattggacttacgatggaaacgatgttagtaacgccgtttgcgattatttatctagtaatgacaggagtacatggtttcggctcatttggctctatctcaatgttatcgacattactattaataggagcgggtattgttacagctctaccacttttttattttgcaaaaggagcccaacttattccgctttatatggtaggttttttacaatatattgcaccaacaattagcttaattttaggtgtattcgtatttggtgaacatttcacatctactcatatgattgcatttttctgtatatgggttgcattatttgtattctcggtagcgaagactaagtttttagtgcagaaacaaccgaaatttataaaaaataaatcagcaaaagtatcataatgcgtagtattttctacgcatttttctttatactgatactatataggatttccattatagctagtaaggagctgagaacatggaaacaattttacataatgatccgcttatggcagctgtaatttcatggtttttagcacaattaacgaaagtagtctttaaattagttaaaacaggtgaatttgattttgcaaagttttttgcttcaggtgggatgccaagttctcatgcttcaacagttacagcgcttgctacaggagttggagtagtggaaggtgtggaaagctcgatgtttgcggttgctactatttttgccattattgttatgtatgatgcttcaggagtaaggcttgcagtaagtaaacaagcaaaaatattgaatgacttttttcacggtagagaaacagaatataagaagttaaatgaacttgttgggcatacaccgtatgaagtagtagtcggtgctttattaggaattattgtcggagtagggtattgtttatgagcagaacattttatatgttctgcttttctttgtttttatacatattcagctacctttttgaatatcgttatacggatttcgaaagggtgggtgagtaacttgttattatatgaaaaagtgtatgaagaaatagcgagaagaacaactgcacttcaaacaatgcaacggcaagatggtacgtggcggttttgttttgagggagcgccattaacagattgtcatatgatttttttattaaaattattaggtagagataaagagatagaaccgtttgtaaaaagattagcatcactccaaacaaatgaaggaacatggaaattgtatgaagatgaggtgggtggtaatttatctgctacaattcaatcttatgctgccttacttgcatcggaaaaatatacaaaagaagatgcgaatatgaagcgagcggaaatgtttataaatgagcgcggtggggtagcgcgtgctcattttatgacgaagtttttattagcgattcatggagaatatgaatatccttctctctttcatttgccaacaccaattatgtttctgcagaatgattcccctctcagtatatttgaactgagtagctcagcacgtattcatttaattccgatgatgttgtgtttaaataaaagatttcgagtagggaaaaagttattgccaaatttaaatcacattgcaggcgggggcggagaatggtttcgggaggatcggtctccagtttttcaaacgttagtaagtgacgtgaagaaaattataacgtatccactttctttgcatcataaaggatatgaggaagtagaacgttttatgaaagggcgtattgatgaaaatggaacattatatagctacgcaactgcctcgttttatatgatttatgctttacttgcattaggacattctattcaatcaccaattattgagaaggctataatgggaattacatcttatatatggaagatggagagagggagccatttgcaaaactctccgtcaactatatgggatacagctttactcagttatgctttgcaagaagctcaagttccgaaagtaagtaaagtgattcaaaatgcatcagcgtatttactaagaaaacagcaaacgaagaaagtagattggagtgtacatgcaccggatctcttcccaggtggttggggcttttcggatgtgaatacgacgattccagatattgatgatacaactgctgtgttaagagcgttggcgcgaagtagagggaacgaaaatgtagataatgcttggaagcgagcggttaattgggttaaaggattgcaaaataatgatggtggttggggagcttttgaaaaaggggtaacgagccgtatattagcaaatttaccaatcgagaatgcaagtgatatgattacagatccttctacaccagatattacaggaagagtgctagaattttttgggacgtatacgcaaaatgaattgcccgagaaacaaaaacaaagtgcgataaattggttaatgaatgtacaggaagaaaatggatcgtggtatgggaaatggggaatttgttatatatatggtacgtgggcagtgttgactggtttacggtcactaggaataccatctagcgattcatcattgaaacgagccgttttatggcttgaacatatacagcatgaagatggtggctggggagaatcttgccaaagtagtgtggaaaaaagatttgttactttgccatttagtacaccatcccaaacagcatgggcgttagatgccctcatttcttactatgataaagaaacgccagttattcgaaaaggtatttcatatttgctctccaacccttatataaatgaaaaatatcctactggaacaggtttaccaggtgggttttatattcgttatcatagttatgctcatatatatccgttgcttactttggctcattatgcaaaaaaatatagaaaataaaccgagagatgtctctcggtttattttgttgggtagtaggtcccttttgaaaagaataaggttgtgatgtaccttatttttcggttgattggcgcttttgacgtgcatcagcggcatttgcacgtgcgtttgcttctaagtcattgtggtcagcgagttcgcgagagaactcaacatcaatgccatcagttgttttgctttgtttgaaattttttttattcattcgacacaatctccttgcaatttatcccgcataacgggtagtaaaactcccaccttaaaactcagatggaacaaagaagctaggtgggagattaaatgcccgattggtgagggctgataatcagtgggggatgaacaaacttcccactaattaaagtttcactttatgcgacgttgcaaagttagtttgacacaaatagacttttttatacaaagaggagttggaaagtaaaaagccgaaatatacagtataagtaatagaaatgggggataggaatggagtttttaaatgggaaaacagctgttgtaacaggagctgcacagggaattggaaaagagattgcaagggtttatgcaaagctaggggcgaaagtattaattagcgatgtaaatgaagagacgctacaaaaaacgacacgtgagttatcagatgaaggatatgaagtgtgctcatatcgatgtgatgtgagtaatcaaaatgaagcaaagtcgttaattgaatatgcggttcaaaaatttggtacattacatattttggtgaataatgctggaattacaagagacgcaatgttacataaaatggagaaatctgcttgggaacaagtattacaagtgaatttaactggagttttttattgtatgcaaccagcgcttctttatatgagacaacaaggatatggaagaattattaatatttcttctataagtagagaggggaatattggacaggcaaattatgctgcaacgaaagctggagttgtaggattaacgaaaacagcagcgaaagaagttggaagtttcggtattacttgtaatgcgatttgtccggggtttatggatacagatatgaccaaaacgataccagataaagtgaaagaaaagatggttggcgctattccagttggtagaattggaacgccagaagatattgcgaacgcagcagcctttttagcatcagaatacgcatcttatattacaggtgaagtattaaatgtgagcggaggactgcaaatttaaaggaatacataatgaaaagaacctgaccggataggtcaggttcttttcattaatttaagttaagccaaacgctctttacttctgtatagttatttaatgcataagatcccatttcacggccaagaccagattgtttaaatcctccaaatggagatgctgcatcaaaaacgttataacagtttacccacactgtacctgcacgtactttgcttgcaacatagtgtgctgttttaacattttctgtccatacaccagccgctaagccgaattgtgatttatttgcacgttcaattacttcatcaatatcgttaaatggtattgcagaaataactggaccgaaaatttcttcttttgcgatcgtcatttcatcatttacgtcagcgaatactgtaggagaaacgaagtagccttgatcgaatggattacttcctccgcaaagtacttcagcgccttcttcaatccctttttcaatgtagcccattacacgtttttgttgttcttcagaaacgagaggaccaattgttgtttcagggttaagaccgacaccttgatttagttttttagaatagaggacgagatcagccatgacattatcatacattttcttcggaacaaataagcgtgatccagcagagcatacttgtccttggttaaacataacaccagaaagtgcaccaggaatcgcgcgagataaatcagcatccggcaagatgatatttggtgatttaccgcctaactcaagtgtaacgcgttttaatgattcggatgcttgtcgcataatttgtttaccgacaggagtagaaccggtaaatgcaattttatcaacgagtggatgattaacgagagcttgtccagctgattcaccgaatccaggtacgatattaataacacctttcgggaatccagcttcttcaattaattcagctaagtatagagcagatagtggagtttgttctgcaggttttaaaacgattgtacatcctgtagcaagcgctgctcccattttccacattgccataagaagcgggaagttccaaggaataatttgaccaacgacaccaacagcttcatggcgtgtatagttaaagtaatcaccggaaacaggaattgtttgaccaacgattttcgtagcccagccagcgtaatagcgcatatgctcaattgcaagtgggatgtctgctgccattgtttcacggattggctttccgttatctaatgtttcgagctgtgcgagctcttctttatgttcttccattaaatcagctaacttgtacatgagacggcttcgctcagcagtgctcatacgagaccaaggaccttcgtcaaaagccatacgagctgcgactacagctttatgaatatcttcgcgaccagcttcagaaacgacggcaagtgtttcaccagttgctgggttaggtgttttaaatgttttaccggaagcgctttcaatgaaagatccattcacatataacttttttgtaccttgaagaaacttctctaccttttcatgaagatttacagctagttgactcattgtataacccccttgaaaatataatgtaaacgcagtacgagacggcgcttattccgaaatcaaggatgtggaaactagatggaaagcctctaattaaaatcataattaagaaatactgaaaattcaaatttcattcgtgttacaattgtaaaaaatatgtaatgtaagagaatcttctatatgattataaaaaaatcctgcttgtttttgctttctagtaggaaaaactagaagaacaatggtacaataatacatcgtgagaggaggggtaaaaatgaaagattatcatgatgatccacgctttcgaatagcccatagagaagcgttaattggtcttggacttgctattattaattttataatttggtacggatttgcttatgggcttggtagtaaaaatccgaatgaatatacatatgtattaggttttcccgcatggtttttttatagctgtatcgttggatttatcgttatggttattttacttagtttagttgttcgttttgtatttcaagatatttcactcgatgaggaagaaaaaagtgaggaataatagatgaattggtatgtaatcattccaatgataatttcgtttatcgttgtatttttaattggtgtatatgcttcaagacgcgtgcaagcaactgctcataataaatttttgcaagaatattttcttggtgggcgtgagctaggcggtttattattagcgatgacaatgattgctacgtacggtagtgcaagtagctttattggtggccctggtattgcttacaatatgggtcttggatgggtactgttatctgcgattcaagttgtaacagggtatatcgttttaacggttatcggtaaaaagtttgcaattatcgctaggaagatggaagcaattactcttatcgattatttaaaagggagatacaataataaagcagttgttatactttctgcgttatgtattattatctttttattttcagcgacagtagcccagtgggtcggtggtggacgattaatcgagtcactaacggggctatcgtatacaacagcactatttttatttactttttctgtacttgtgtacgtattaattggtggatttcgtgcagttgctctatcagatacattattaggaatcattatgttagttggaacaacaatcattttaattgctactgtcattgctggtggtggaattgaaaagattatgcaggaacttgttcaaattaatccaaagttaattacaccattcggagcagatggcagtttaacgaaatcatatgttacatcattttggattttaattggaattggcgttgtcggtttaccgcaaattagcgtgcgtgccatgtcttataaaaattcaaaagcgatgcaccaagctttaataattggaaccgttgtcgttggcacaattatgatcggtatgcatttaacaggtgtatttgcaagagtagtacttccaggtataacggtaccagataaagtaatgccgctacttgcgatggaagtgttgccaccttggttagctggagttttcttagctgcaccgatggcagcgattatgtctacagtaaactctttattattacttgtaagctcgtcaattattaaagatatatacgtaaattacataaataaagatgcagcagacagtacgataaaaaaaggaagtttgtggattacgggtattgtaggactactcgtttatgcagcggcaattaaaccaccagattttttaatatggctaaatttattttctttcggtggattagaagcagcattcatttggccaatcgtattagggttatattggaggaaaggaaatgctacaggagcgcttgcgtctattttagttggggtaggctcatatatgtgtattcatcttttctatccaaatccgttcggtatacatacagttgtcttcccgatttgttttgcgtttatcgcttacatcattggaagtatgagtgctgtaaaaaaaacagtataggttagctgaagaaacgtagtccttataagactgcgtttttttgtgtgaatttgttcattttttattctgtatatccacggttattcataaattaataacaactgaggggatggagttgaggtcgatgaaaaaagtattatttttaggagacccaggcattgatgactctttagcaattatgtatggattgttgcatcctgatattgatattgttggtgtagtaacgggatatggaaatgtaacacaagaaaaggcgacaagtaatgccgcatatttattgcaaatggcaggacgggaagatatacctgttattaatggtgcgaaaattcctttatccggagatattacgacgtattatccagaaattcatgggacagacggtttagggccaattaaacctccaaaaactttttcaccaaatataaagcctttttgtacattttttgatcttcttgaaaaatataaaggagaattaataatagtcgatgctggtagatcaacaacattagcgacagcatttattttagaaaagccgatgatgaagtatgtgaaagaatattatataatgggcggtgctttcttaatgcctggcaatgtaacaccagtcgcagaggcgaattttcatggtgatcccattgcgtcacaattagttatgcaaaatgccaaaaatgtaacattagtgccacttaacgttacatctgaagcaattattacaccggaaatggtaaaatatattacgaaacactctaaaacgagttttaataagttaatcgagccgatatttacgtactattataaagcttatagaaagttaaatccgaaaataaaaggaagtccagtacatgacgtcgttacaatgatggttgcggcaaatccatcccttttagattatgtatatcgtcgtgtcgatgtagatacagttggaattgcaaaaggagagagtattgctgattttcggcctcaacctgatgcaaaagcattaaaaaattgggtgcgaattggttggtcgttacattataaaaagtttcttgaggattttgtgaaatttatgacgtagacataataggagcatacaagttaaaataatggagatggttatttaaatgaccatctccattattttgtttttaaatgataaatagagaagagttacacaataggagaggaattttacttgaaaaaaactatagtatgcgcagtaattgtgggtatttttgttttgctaatatcgggtaactttttagtgaaaaaagtgtggagttcaaataatgatgatgcacagtatattgcatcttttattgaagaacataaagatgaaaaaaatagtgcgcttctagtaaagagaaatgataaagttgtttattctgtaaacccaaatgttgtattgccagttgctagtacgatgaaattaattgtggcgcttgaatatacgaaacaagttactgaagggaaaattgattcttctagtttcgtgtcgattaatgatgtgaatcgttattatgtgccgaatacagatggtggtgcacaagatagatggcaaaagtatttggagaagacgggcaagataactgaaggagcggtttctttagaagaagtggcaaaaggaatggttaagtttagttcgaatgcaaatgctgaatacttaatggaattgttaggattagataacatcaatcgaaatttacaaagtttatcacttcctgcacatcaaccactatttccaatcgtttcatctttgtatatcccgggatatttgcataaagaattacatgttccaaaatataaaatagagaaaaagttaaaagaaatgtctcaagagcaatatcgtgaatatgcgatgattattcatgaacgcttaaagaagaagggaccattattacagaaggaaattccgctttatttagaggaacgttacgacaaaatttggtcagatagattaccagcagcttctgcaaatgattatatggtattacttcaaaaggcaaaccataaaggtggcttgacagaggctgaagaaaaagtgtgggcaaatatcgttgaaacagacatgagtgccaagaaataccgtaaaacattcagacatgcggggcaaaagaatggttacacaccatggacggttacaaaagcagtttatgctatggataaacgtggaaactgtacagaaattgtgtttttggcgaataatttaaatgaagacgatagtgcagaaatacggaaacatttagcaaacttgcatttccaagtgttgcaaagtgataagtatgatgcgacttttattaaataaactcggtgcagagagcaccgagtttatttttatgtacaagcactttttttctatctctgggtatgatgggtagtaatacttaggtgagaggggaaaaggtgatgaaacaaagtaaagaagagtttataaagagtgaaggcgctgatttccctgggaaaacatatgtggattgtgtattacaacatgtatttgattttcaacgaaattacttattgaaagatatgtttcaagtgcataaagcacatattacgatgctgacggaagaaaatttaatgaaaaaggaagaagctaaagttatattacacgcattaaaaaaggtagagggaattccagaagagcaattgctctatacagagcagcatgaagatctcttttttttagtcgaacatttaatttctcaagaagcgaaatgcgattttgtaagtaatatgcatattggtagaagtagaaatgatatgggcgtaacgatgtatcgcatgagtttaaggcgatatgtattacgattaatagaacatcatttgttattgcaagaaagtgtactgcaacttgctgctgatcataaggaaacgatcatgccagcttatacacatacacaaccagcacagccaacaacatttggtcattatacgttagcaatttatgatacgatgcaaagagatttagaacgaatgaaaaaaacgtaccagcttttaaatcagtctccaatgggggcggctgcactctctacaacaagtttcccgattaaacgagaacgagttgctcatctacttggatttacaaatgtaattgagaactcatatgatgctgttgctggagcggattatttattagaagttagctcgctacttatggtaatgatgacgaatacgagtagatggattcatgactttttgttgttagcaacgaaagaatatgacggtattactgttgcaaagtcatatgtacaaatcagtagtattatgccgcaaaaacgaaacccggtttcaattgaacatgctcgtgcaattacgagtagtgctttaggagaagcatttacagtatttcaaatgattcataatacaccatttggtgatattgtcgatacggaagatgacttgcagccatatttatataaagggattgaaaaggcaattcgtgttttttgtatgatgaatgcagtgatccgaacgatgaaagtagaagaagaaacgttaaaaagtcgttcctataaacatgcaataacgataacggatttcgccgatgttttaacaaaaaactatgaaattccatttcggcatgctcatcatgcagcaagtgctattgcaaatatgtcattggagcagaaaaaagaactacatgaattacacttcaaagaggtaaatatgtacttgcaagaacattttaaaataaatttattagaaaaagagtggaaagaaattatatcgccagaagcttttattcaaaaaagaaatgtatacggtggaccgagtaaaaaagagatggagcgcatgatcaaaaatcgaaaagagtcatttcaaaaagaagaagatgtatttgaaaaggaaaaacagagaattttacaagctgaaaatgctttgaatacattagctttgaatattattgaatcgtaaaagagggatttgatgaattaatcgccaatacttaattaaactatgaatagagagaagagattgtcgatgattcaattacatgtatatgaagagatttttcattttaaagaagatgttacaccatttctagaaaagaatgagcaggaaaacaatctcatattaggtgtattacaaatggtccaagaaccgatatttatggggatagcgaaacaaggagaagaaattgcggttgtatttctgcaaacagaagagaagaaacaaatcattgttgcaacttctgaaattgcgggagtaactattgaggaacttgcaaaagaattaacgaaagtatatccggatattcctggattgatcggtaataagaaaattgtacagaaattagcggaagagattgccgtattagaaaataaaaaaacgaatgttgcaatggagcaaggtgtgtatgagctgaacagagtaaagaagaagtgtaatgcgaatggacttttccgagcggtaaataatgatgaattaccattaatagaacagtggatatatcaattttgtgaagacgtaaagcttcctactacgaaagaagaagcaaaacaaactgcgtatacattaataactacaaatcgactgtttggtttggaagtggatgggaaactcgtttctgtagctgcaaaaacgagaccaactaaaaataatataacagtcaatttcgtatatacgccgaaagaagcaaggaaaaaagggtatgcatctcattgtgtagcagcacttagtcaacgtatgttagatgaaggctaccagacgactacgttatatactgatctagcgaatccgacatctaataaaatttatcaagaaattggttatgaacaaattgcggaatctgtgctcatatttttagagaagtaaaacaaaaaggcgtgctattttagcacgcctttttgttattcatcaattctaataacctcgccttgagggaattcctcagtttctagtaagttacgaatagctttcgcaacatattcaggtgataatagctttccttcttcttttaatgcaatgaagcggtctaaatttgtgaagtcttctttagctgtttcacgaatttgtgcttgcatatttgtatcaacaacaccgggggcaaaagcgacgatttttactggatattctttttcccattcttcagttgctacgcattgtgtaaacatatttacaccagctttcgtcgtacaataagcgccccatccgaaataaggattttttcctgcaccagatgaaatatttataacgcgtttatctactttccattctttcgtatgtttcataaacgtagatgtaagaatcataggtgcaagtaaattaatgtgaacgttcgtaatgaattgttcactttctgctttttcaatcggcttcataggtgcaactgtacctgcattattaattaaatgaatagaggatacattgtcttctttaatggatgaaatgatttctttaaagttagtttctaagttatgtacatcttgaagatctaaggaatgaaaaatgcaattgctgttatattgctctgcaagtttagtaagttctttattttctcttctagaaatagagatgacagttgtactttcttctaacaactgagtggcaatagcctcacctaaaccttgtgaagttcctgttatgataacgtagcgcatagttttataaactcctctcgtatgtgcggaattttgttggacaacgtacattgcatagtttgtctacattttatagtatagagcactttttactataaatgaaatgagatgattgtgtgccttttataaaccgttttacaacaacagtacctggtgccgtcacgttcactgggaacacgttagggcttagccctacatcacctgcgccaggtaatatttttggtacacttgctgtatttactacggtaaatacagcgctgcaagtaccagggttcccagcaggaacgacggatgaatggcaattgaattcttcaagtgcaattttaaatcttccggcggggagtagtgtactatatgcagagttagtttgggctggtacttttcggactgatacggaagatgttttaccatttttaaatgatgatattacatttacaacaccatcagggacgtttgctgttacgccagatcccgctaccgcgcagcaaggttcagtaggaaatcagttttattatgctcgctctgctaatgtaaccaatcttgttagtgcaggtggggcaggcacatatacaacaggtgctgtgcccgctgcaagaacttcagctgatccaacaatcagtcgttcagctggctggacgcttgaggttgtatatcaaaatgcaagtttacctcttcggaatttgtcagtttatgcaggccaagaaattattgatgcttcatccccgcctgttgatgctactatttcaggatttgctactccagctacaggagctgttacaggaagagtactcgtaactgttcaagagggagattccaacatttctggagatcaacttcgctttggaccaaacccaaatgctacagttgcattattcggaccgagaaatccggcaaataatttctttcaatctcaaatttgtaatgactttggggaattagatacaaccggaacgtttggagatttgaatcagccattagggatagctttggctgttcgaagacaaggatgggatattacaaacgtagatgcttcatcatcattagtaaataatcaaacgtcagcaaccgttcggttcgttacaaatggtgatggttatgcagcggctggttttggtgttcaaattgatgcgacgggaccgattataaatcctgtcaaatctgttgataaagcagttgcaggtataggagatattctcacttatacgattacagttccgaatacaggaacaggaagtgcggacaacgttttattacaagatagtattccgaacggcacagcatttatagctggtagtgtaacggttggtggagtaacacaaccaagtgcgaatccagctagtggaattaatttaggaacgataccaaataatgctcaaagaatcgttacattccaagtaagaattacatcgtttccaaatccaaaccctatttcaaatcgtgcaatggtgtcttaccaatttcgtcctttcgttggtagccttcctattgcaagtacgtcttcttcaaatacagtacaaacgacagtgaatcaagcaactataagtatgcaaaagtctgtagatctacagacggcaacacttaatgatgtattaacgtacacggttaatgtaacgaataatggaaacatcactgcaaacaatgttatttttgttgatagtatccctgctggaacaacatttgtcgcaaatagcgttacggtaaacggggtagcacgtccaggagcgaatccagcaagtagtattaatcttggaagtattaatgcatcgcaaacgactgtagtgcgctttcaagttcgagtgacatcaaaccctcttgtcaatccaattccaaaccgtgcgagtgtaacatttaactttactccagtacctggtcaaccaccagtttcagggcaagcgacaagcaatactgtagttacgacaattaatatagctgatataacaacgagaaaaacagtggataaagcttttgcaacggttaacgacgttcttacgtacacggtaacaattcaaaatacaggaaatgtacttgcgacgaatgttatttttcaagatccaatcccaactggaacgacttttatcacaaatagtgtaactgtagatggaatttcgcaacctggggcaaatccggcaactggctttacagttgctaacatatctccaggtgggactaggacagttacatttcaagtacgagtaacttctacgccatcaggaggtacgattccgaatcgcggaaatgtgtctgctaatttcgtcgttattccgaatcagccgccaataacgattaatagacaaacgaatacagttgtgacacaagttaatacaggcagtttaaatgtaataaaagaagtgaatacaacacaagcagcagtaggagatactttaacatatacgattgccgttcaaaatacaggaaacgttccgctaacaaatgtgttatttcaagacactatttcttccgctgtttccttcgttgcaaattctgtaacaattaatggagtacagcaaagtggactaaatccgaatacaggattctctcttccaaatattcctgcggctcaaacggttgtagtcacatttgacgtagtaattgtacagaatccagaaaatgaagatattttaaatcaagcaaatgtaacagcaagctttcaagtgaatccgaatgaaccaccagtaacaatcaatgtaccgagtaatgttgtgaatacgacagtacaatcagggaactttgaagttgtgaaagcagtgaatacgaatgtggcaacggtaggagatgttttagtatatacaatcgaagttataaatgcaggtagtgtaccagctacaagtgtatttttccaagattcaattccgccagggacattatttattgaaaatagtgtattggttaatggtgttttacaagagggggcagatccaggactaggattcccattaaatgatttacctactggcgcgagtgtaattatttcatttgaagtattaattgatgaaattccgccagggaataatgttgtaaataacgcgaatgtaactggagattttcttgtaaatccaacagagccaccaattactgtgacggttccaagtaatactgttatgacagttgtgaattcctcaggactaaatgtaatgaagagtgtaagcgctactgaagcaggtgtaggagatacactaacatatacagttgctatacaaaatagtggaacggtagtagcgacaaatgtatcattccttgatccgattccagttggaaccacttttgtagcgaatagtgtaacaataaacgggacacctcaaccaggtttaaacccgacaactggatttccacttgctaatattccagtaggaggtatagtaacagttactttccaagtggcaatcacgagtgtaccaccaaatagagttcttccgaataatgcgaatgtaactgctgatttccaagtaagtcctctccagccaccaattacaattgtaacgattagtaatattgttgtgacgcgggtgaatgtaggatcaattaatgtaataaaaagtgtaaatacaccacaagcaggtgtaggagatacgttaacgtatacgattcttattcaaaatacaggaactgtccccgcaacgaatattatttttcaagatccaatcccatctggagctacatttgtagcgaatagtgtaacgattaatggagtcgttcagcaaggtgcgaatcctatagtgggttttcctgttacaaatattccagttgggcaaactgctacaattacgttccaagtgacagtgacaagcgttccgagtggtggaaatataagaaatcaatcgaatgttactgcaagtttccttataaatccggcaggacctcctataacgactactacaaatagtaattttgtagtaacacaagtaaatacagcgagactaactatacaaaaatcttcatctgtacaacaagcagcacttggagagacttacacatattctgttgttatacgaaatacaggtacagttgcagctacaaatatttctttcattgacacgattgctccagaaacaacatttgtagcaaatagtgtaacgataaatggaacgcctcaacctggatttgatccaaatattggtttcccgcttcctaatattgcagctggcacatcattgacagtaacattccaagtgatagttgttgcaccatcaacgcttggggcagttctaaacacagcgtctgctacagctactttcttattgaatcctttacaaccacctgtaacaacaacgaactcaagtaatacaacggtagttacaataccgttacctcctcctggtgaagtgacagcaataaaaacagtaaatattgcaactggggctgttggggatgtattaacgtatacagtgctaataacgaatgtaggaattatccctgttacagatgtactcttccaagatgtcattccagaagggacgacgtttgttgacaacagtgtaacgataggtggagtgcagcaacctggattaaatccagaaataggctttacagttagtccgttattaaatgctggtgcgagtatttctgtaacgttccaagtgaccattacggaaattcctgataatgaagtcatattaaatgatgctgacgttacatttacttcacaaccgaatccgcaggagccaccgattacgcaaacgatattaacgaatttagtcgttacgacaattaatatagcttcaatttttccagtaaaaatagtagataaaggggcagcgacggttggggaaatattaacctacgatgtactaatttttaactttggaacggtaccggcaacgaatgtccaatttcttgattctagtacgagtggtgtagcgtttgttccaggaagtgtgagtataaacggagtgccagaaccaggattagatccgttcataggctttacagttccagatatacctgtaggtgattttgtacttgtcacataccaagagatggtaacgagcatacctcaaggtggaacagttgttaactttgtggacgttacggctacgtttgctgtaagtgaaacagagcctcctattactgaaacgacgacaagtaacacgacattaacagaaataaatgaatctggttggaatgttttaaaatcagtaagtcagccggttgttgcagtaggcgatacaatcacatatacaacagtagttcaaaatacgggaacagtgatagcgacgaatgttcaatatagtgatgtattaccatcctctataacattcgtaccgaatagtgtaacgataaacggtgtgttacagcctggattagatcccaacactggcttctcacttccggatataactccaggtgaaagtgtagaagtcacattccaagtaacagttgttagcgttccgtcaaacggaacaattgccaatacggcaaatgttaccggaagctttattttagtaccaggagaaccaccagttatagtaaatcagccaagtaatacaacactcacaactgtaaatagaggacgctttaatgttattaaacaagtaaatagagccgctactctagttggagatgtattgacgtatacagtgcaaataacgaatacaggaacagtaacagctaacaatgttcagtttattgatacgatttcaacaggtgcgtcatttgtaccaaatagtgtaacgataaatggagccccgcaaccaaacttaaatccgattactggatttggagttggagatatcccagttggtgaaacagttatagtgacgtttcaagcgacagttacaaacatcccgtcatcaggaacaattacgaacgttgcaaatataacaggaagctttactttagtgccaggagagccaccggttgtagtaacagagccgagtaatacgacgataactagagtgaatagaggacgattcagcgttataaaatctgtaaataaagaagcgacacgattaggagatacgttaacgtatagtgtgcaagttacaaatacgggaacggtaacagcgacgaacgttcagtttagcgatgttccatcacctagtttagaattcgttcctggaagtgtacaaataaatgggattccgcaagtaggtttagatccatttgtaggctttgcattgcctaatcttgcagtaggggatagcgtattaattacatttgaagtaaatgtaatcgcagttccgccttctaatagcattatgaatacagcaagagtaacgggtgattttgaattaattccaggagaacctccgtttacaattacgaattcaagtaatacgacagtcacaccagtaaatagaggcagtttagatatgcaaaaagaagtagatcattcaattgttggagtaggagaaacagtaaagtatacggttcgaatattaaatactggtactgctgatgcgatgaatattcaatttatcgatgtcctatctccggaagctgtttttgtaccaaatagtgtaactgtaaatggagtagctcgtccgggagtaaatccgcaggttggatttacgattgtagacattccagtcggtgagacggcgattgtaacatatgaagctacgattacgagctttccagatggtggtacagtagtgaacgttgctggggcgttagcagaatatattttagtaccaggggagccgccagttacagtgatggatacgagcaatacagttatagtgacggtaaatactgcaatcttatttgttgcaaaaggagcaaactttgaagtagcgatggtaggagatgttgtcacttatggaattgccgttataaatgacagtacagttcctgtgacgaatattgttttaacagatatcattgatccgaatactttatttataaatggcacggtaacggtaaatgatgtacctcttccatttgctaatccgaataccggtattccgttaggtgattttcagccaaatgacgcagcaattattaatttccaagttgtaataacaggaggacaaataaataatttagttacaaatactgctatagcaaatgggctcgcaactgtaaatccgaatgagccgccagtagtagttgaaggtgatagcaatacagttgttatcccgtttattcctcaaaatgtctcaacgacagtcgtaaaaacggcaaatttacaggcagcaacaattggcgatgttattacgtttacgacagttattacaaatacgggggatacagcaatacaaaatattcgttttcaagatatgttagatagtagtgttcaatttgtccttggaactgtaacgattgataatacgccagtgccaaatgtaaacccagtatcaggttttattataggaaatttaaatccaggtgaagcacggacagtttcgttccaagtagtagtgcagagcgcgccaaatggttcaggaaattatataaatcaagcgagtattcgtttcgaacatcaagtaggcacagtattgccacctgttacacaaatggtagaaagtaacatagttgtcattccatttgttccaacgatagaacaaatttgtgaaacaaatcttaattgcttagggaaaattccttttcaatgttctccgtgtaatcatttgcaaataaataaaaaataaatacagaaagagcatccggaaaaaaggatgctctttctgtatttatcatgtagattctttttcgggtgaggtgaaaaattcgtcgattttgtcggagagtagtaatggaatggcttcttttataacagaaatgtcccagtcccaccatgcgagattctctagtttgtcaatcgtttcttgggggaaacgatatcgaacaaattttgcaggattaccagctacaattgcatacgggggtacatcttttgtaacaatgctcctggcgccgataatggccccgttaccaattgtaacaccagataaaatgcaggattgataaccaatccatacatcattgccgactacgatatcaccttttgaagaagggtgaccagtaatatgtgctccttcatcaaaaagtgcattaaatggataagttgttatccagtctgcgcgatgttcaccgccaagtatgaaaacgatttcttctgctaatgaacaaaacttacctatttttaattttgtttcatcgttccaagaaaaaatggttggccctactttactataagtataatcaccaatatcatatttattatattcaggtttttgatttaaatataacatgcttcttcagcctcctttctcaattaagtgatacgtatggaatattatatgcaagatgtagtaatgtgaactgtattaataggtgaaatgaacaaaagggagtgggatgtatgcgatacgaaatgggtttatataataaaccgtttcagtcaattcaatcaggaaaaaaagtatatgaagtacgcctatacgatgaaaaacgtcaactaataaacaaaggcgatgaaatcgtatttacgaatcttacgacaaaagaaatgatgacggtaaaagtaacggaaataaagcgatacgagagctttaaagccatgtatgaacaaatcgataaaaaattattggattgtgaaaatgatagtttagaggaaatgttagaaagtacatacaaaatatatacgaaagaacaagaaaaagagtggggaacagttgcgatttgtattgaggtaataaaatgataagaaatcgcggagcggctatcattgtacaggaaggaaaaatcgctcttataaaacgtattcgagaagaggaaacatattatgtgtttccgggcggagggattgaggaaggtgaaacgcctgaagaggcaacgaaaagagaggtatacgaagaattaggggtacatataaaagtggagcaccttattgcacaggtaaaatataaagggaatgaatattattatgctgcctatattacaggcggagtgttcggaagtggaacagctgaggaatttcagtgggaaggtagaggaagttatattccgttatggctaccgataaatgagttggaaaaagtgaatataaaaccttatgaagtggtcggaaatatatttaatcattataaaatataacgtctgacaacatacaaaaaaaccattgacataggcttctgatttaagtattgtattcgagtatgtttataatcaggaggtttatatgagcaatcaaactactacacatcatgtgaaaatgacaacagcagatccatctggaattggtctatttggattagcgatggtaacacttgtagcatcatctcaaaagttaggcttaacagatggcgtttcacttgtattaccgtgggcaatctttttaggaggatttgcacaaatctttgcttgcattcatgatgcaaagcataacaatacattcggtacaacagcattcggtgcgtacggtctattttggctaggtgttggaatgacttggttaattcaacttggagtatttggcgaaaaattagcacaagctgcagattcaaaacagcttggtgtagcctttatcggatatttgattttcacaatctttatgacaattggtgcaatggaaacacataaagtattatttatgattttcgtccttattgatttcttatttatcggtctttcattaagtactttaggtgttatgccgcatgcaatgcataatttagcagcatattctgaacttcttatttcattattatctttctatggttcagcagcagcagtgttaaacacacacttcggaaaagttgttttaccagttggaaagccgtttggtatttttaaaaagtaataaaaaagcacagatgattgtatagtcatctgtgcttttttatttattgaaagctatagcagtcgtccttgttaattcagaaattttttgagagctcgcagaattaccgtctattgttacatgaacttgttgcttagggttcgctgtaactacccatgcgtttggtaaatagcgtgatttatgagataaggtggaagggatatttaaaatatctcccattgcatataatgttgctgatgatccaccgtccattgccatcgcattgacagcacctttttcataaagaatatcttgacaatctctcaaggaagcaccaatgctatgaggttgtctaccatcaatgacgaaaaacataatcgatccatcttttttctgagccataatgcttcgagggccatatccccaaccaccatcatttgtaatcattttttctccatttacaattagctgaggcataaatccagcagcggaaacaacatttttatttaacaattggttagcagaaaactctccagaaaccatttgtccatattttgtaataccactagtgagggtaggggtattaatatctttcggcgtgtttataactttaccgttttcaataacaataccgattccggttttaccaccaccatgcccggtttcatcccaaaaaccactggcattgacagcggcaactgcatggtttcgctttgccattacgtatattttttctccgacgtctttaccttctgaaccttgctgggtaacaagttttacgttgaatggattactaattgtcattaatttcccttcgaaaaaatgatcattatattttttctttattgtttcaatagaaacatctagtggtaaatcttttcgtctttctaactctttttttgaaagtttagaagttaaaaattcactatttttccattttggatttgtgatggattgagaaatatcatttaattcttcatcagacaataacgtgaattttgcatattgtggatgctgagaagttaaaatactctcggctgcgataacacgtaaattatgaccgtatgaagtaccgaataaaataatagcagctcctattagtaagaatattgttaaaagggaggttgcttttaaaaatctaataaaatactttctcatcataaggactcctctttctgtaaagtgaacaattgattagagattgagcatgatacaaaaacattttttatttgaaataagtaatgtgaaatgatgataatacaataatgtttgaagatagatttggcaatagttgaatatgaatgtagatatttaaaatgaaatataaatagtcagatgtgaaatgtaaataaaagtagaaaaaaatcaattgaaattgattctcattattaatataatgagaatgagaatcatttattgttagagggggatgccaaagtggcaaaaattttaatagcttatgcaagtatgtcaggaaatacagagagtattgctgatttaattaaagttagtttagatgcttttgatcatgaagtagtattgcaagaaatggaaggcatggatgctgaagaattattagcttatgatggaatcattttaggatcttatacgtggggcgatggtgaattaccatttgaagcggaagattttcatgatgacttagaaaatatagatttagctgggaaaaaggtagcggtgttcggatcgggtgatacagcgtatgaactgttttgtgaagcggtaacgatatttgaagaacgtcttgtagagcgcggtgcagagcttgtacaagaagggctaaaaattgaattagctccagaagatgaagaggatgttgaaaaatgcagtaattttgcaattgtatttgctgagaagttctaagaatgggagtgtcaacgtggagacaatgttaagtgtaactgctattacaaagttaagagatggaaaactgttgttagctactacatataatggcttatttgttgaacaagacggagaatggaaacgaattttaaatggttttcaaaaacgaattagggatttacatagcgaagataatgtagtttatggtgtaggtgacgaagggatttttattcgtagtatgaatggtggagagaactggacaattcagcgttttccaacaaaagcaacgagttggaatgtatgtagcaatgtacaaggaaatgttgttgctcatggagaaaaaacgctgtatctttctaataatttcggttcgacatgggaaactattcatccgtttcttgagtatggcagtgcggcaccgtctattcgatcgttatttttatataaacattacttatttattggtacgaaaatacatgctaaatatggtggtgtttggctctttgatttgaagacacgtaaattaaagaggattaaaattgcgatgaatcaaatgatctccgcgttgactttacacaattcttatttagtagcggcaagtggatcgtgcaagggagttagcgggaatatttcttattgtaaaatagatgaaagtattgcaagtgaaaaaatatattggcacacatgtcaaagtgagcagaaagcaagtagttatttagacttaagtgtagatcaacatgttttatatacaacttcaacgcaaaataaggcgggtattagtggtgtgtgccgtgtgcttcttgaagaaggtattgttacagtatgtgattcagttaaagggcacggatggcgcattgttaatcaaaaagagggttatgtagtagccggatcaggtgaattaaaagcaatgcagtgggaacaaaaaataatttaagaaaaaactttacttttattatattgatatgatatagtatgtttaaaccattttacttttaataatatagagatttaaatgagctgtaacttccgaggaggatagcaatgttaaatctcctcaggggttgcagttttttaatatctggcttattattgtaaggtggttgaaaatgaatatgtacatataggtacattgtaggaggatttttttcatgcaaaacggtaaagtaaaatggtttaactcagaaaaaggtttcggtttcatcgaagttgaaggcggagaagacgtattcgttcatttctcagctatccaaggcgaaggcttcaaaactttagaagaaggtcaagaagttactttcgaagtagaacaaggtaaccgtggacctcaagctactaacgtaaacaagaagtaatttttgaaaaaagaagggctcgcccttctttttttttgcacttttatagatgtcctcctacttacatatcataacaagactgaattttcatttatttattcggagtatttttgtataaagtacatgaataaataaatactgaaaataaagtgtttgtgtgaaaagcaatttagaaagaggtaaataaattgaaaaacgctacacatttcattgtgtttgatattgaaaggaatttcagaccgtataaatcagaagatccatcagaaatagttgatatcggagctgtaaaaatagaaataggtacaatgaagataattgaagaattttcggagttagtaaaaccaagtgcacgattaactcgtcatacaacaaaattaaccggtattacgaaaaaagatttaatgggtgtagaaaaattccctcaaattatagagaaatttattcagttcatcggcgaaggttctatatttgtttcatggggaaaagaagattatcgctttctatctcatgattgtacattatatggtgttgaatgcccaagtatagaaaaagaaaatagaattgatttgcaaaaatttgttttccaagcatatgaggaattgtttgaacatacgccaagtttacaatttgcggtagaacagctcgctttaacgtgggaaggaaaacagcaccgtgctttagcagatgctgaaaatacagcaaatatacttcttaaagtgtatagcgagagagatattaataagcgatacaaaagacatggtgaacttgaacttgtaaaaaacggaaaaataacagaaaaagcgaaaaaaaagatgcgaaaatgggtgtttaaagaactaaagaaaaatacagaacgcccttttgaatggagtacatttgaaagtggtgacacgtgggaaagtataacggaaagatattatataagtgaaaatacagtagaactcctgaaaaaacattttcgtacagcagtgagaaaagcggaacgacagattaggtatttggctgagatggaggagaatacagaggttaaatgaattgctcctccatctctaactacatacatgtaataacagcgtattgatattaaataggcatcaacttgttgttgtgattgtacattataattgctttgggagtgttaagacgtaataagagttttaaactgtattaataaaataaaaatatatataaagaaaagagtgtagtttaatggaaacaatctttaacattttaactgttttagtttttgggataatatttaccacacaattagcattaactacactttctttcatagtaaagaagaattggaaaaaacttaatatctctttaagttgtggtgtattaaagtttaaaatagaagagtaagattgagttttgtacaagggaggtatgatagtggtagacttggatattaaagatgtcacagtaaagatggaattaaacggtgtcttttggaatgaggatcggattgctgaaatgaaggtgactacaaaagaagagcattccgttattcttcgtctagtagttgatttagaaagtaaaactattagggcgacgagtgcggaaatagtgaatggattctgccctctgtgcaaacagaaaagggacgaatgtagtgaacttaatgacttgcaaaacaaaatggaaattttagaagaagcctacgattgggtgagagaacatccggaatatcgttttcaattatctttttacgagtacaataaatttgaggtagtaaagtgaaatttgcattttaacaacttatagaaggacttggtcaactagaaatattgaagtagatatttctaatggaaataagcctgtataacaaggaagggatatatttgattctgcaacaaatgtcatcttgcatcaaaaaaatttaaaaataaacatgttttattataaagcagaaaaatcgattcttagtagaatcggtttttaatataaataaaagagcgcttattaaaagcgcccagtaacaacagttatatggaagtatttatcccgtaaaagcccgattggtgagggctaataattagtgggggatgaacaaaaccccacagattaaagtttcactttattcaataccgctcggatcaaacgaatactgctgcttattctcaatccgctcaatcacatcttgcagctcatctggcttcagaaactcaataggagagaagcctttttcaaatgtaagtgtgtctgcttcaatcataagtacatatcgatcatttaccttcgcaatatgtatttgatccccaaaatccgcaagcaacgccttcacagagatatgatcggcttttagttttaattccacttcaggagcatgctcgacgatttgagcggttgcttccattacttcttcagttgaaaattgttccataatttcgcgtttcggactggcagcccatacttccatcgcttggtcgaattgttcgcgttcttccgtaccttcttcaaatacatcttcaatttggtcgtataccatgtccattacttgtgttttcataatttcaggcatagagcgttcatattcgacgaattttaagaagtcttcaaagtagcgggcatgtgatgcttgatgtatttttagttcgcctacttcaaccattccttcttcaggcatgtacggatattggatagatttcatattctttgttgtgatggccatttcaacgttacgaatcagtgttgattcatcagaaatagaagcaacctttggttcaaagtcgcatttcattacgaatacgaatggatcatcaaagtatttgcgtagttttgcctgagcaattaaaaatacaccaccacgtacagcgcttgtgtcaagatatgtataaacgagaggttcgctcatatctttaaagttttcttttgtttctgcaaagcgaatacgattaaaaaggttgtaatgagggtttgaatcaagttcgtgcccttcttctacaataaagcgaccaatttttgttggggcttgttctgtttttgcatgacgttctacttttcgcttcgatatttttaataactcaccattcaaaaattcttttaaggaactatcttcatattcttcagcgtctaaagtttgaaaatgtttgtagcgtttatcaactgcttcaccttttccttctacttgtacaacataaaaggaaagataatttatttcaaaatccatatttatcaccttgtttcatttcattaactcttatcagtatagagatggaaaaaactttcgtcaatttatataaggaaggggaagccccttcctttatataatctttattttctcgattaaaatccgtcttctaatgctgcgaatggaatgtttagtctgttttctactgtgcgtaaacgttggtttaagcggtttagtctacgtgtatggcgctcaactgtattttctagttgacgaactctttgttcaagctcatttacgcgtctttctaattgacgatttccagtgccaggaaaagagattggaagttggaattgtctattttggtcatatggattcgtgtgctctgcttgatctatataagattgatattgtgtttgtaagtcatactgtggttgttggtacgcatattgattatatggatcatatggattgtagggatacataataacatcctccatttctttaaaataggttgaattcaccataatgtatgtgtaaaagcggagcggtggcacggcaaatacctatttatgttgacgggatttctctttatcccgctatttgctgggcaataagacccccactggttacagtttcactttataaaaaatagcttgagggtttttgatttgtatttcttttgtgtaatggtatatactggataaaagggagagtttacataaaagttacaattctatcaaactcaaacttttatgtaaatatgtatagacatttataaaagaaaagagtaatttatatagagtgaaaaataacttgtaacattttataaacatattgtaaaatgattgtaacaaaacatacataaaaatgaaataaatacataatagtgatgttggggaaagggagagagtatattgttccgtaaagtaaagggtatattagttggggtgttatgtgtagctataataagtggctgtggtgcaaaagtaagtgatgttgcattggtaagtgatattggtgggcacactgtagaggctaaagcagaagtacaggatactattagtttagttgatggtcgaactggtactgaagtgaaaaaattagatttatctagtttaggctattttgaagatgaagcgaaatttaaaaagtctgtcacaaaggttgttggtgagattggaaaaagcgtcgacaaaaaaatggttccttcacgtatagcacctgatggaagttggcaagaaggaaaaccttcttatgaattaatggaaaaagaattagtagataaattgttaaatgttggtatgtgggatgctacgtatcagttgccgatcgtggagaaaaaaccagtcgcaacattaagtgatgcgcaaggaaatggtgcggtaattggtagatatgaaacgaacttaggtggttcaacaggtggccgtattgagaatattcgtttgtcagcagcgagcataaatggagttgtgttagcaaaaggagaccgtttctcttttaattcattaatcggtgatacaacaccagataaaggatatcaattagggaaagaaatagttgatggtaaattagtagatggatatggcggtggtgtttgtcaaacatcttcaactttatacaatgcagcagatcaagctggcctgaaaatggtggagagaactacacattctaaaacggtaggttatgttccacaaggaagagatgctacaattgcatatccatatttagatttagtatttgaaaatacgaatgatgcacctgtgaagctttatatgggcattcagggtggaaagctagttgctgaagtacataaaatgagataagagttataaagccaccttttctgaaatttagaaaaggtggcttttttattatgaaaataaaaatgtatataaattctgacttttcttatttacataggatgattttagttgtatccttcatagtaacggttatatgtaatggaaaaatatagggataaggagatggagttattcatggtacaaattcatccgaaaacacgtattggtcatgttgaatttaaagtgaaagacttagagcgtcaaattgctttttatgagaatgttgtaggattagaggtaattaagcaagaggggaataaagcatatttatctggaaaaggtggaaagaacgcgttacttgttcttgaaaagctagaggacggggtactgcaagaaccgcgtacgactggtatatatcatgtagcctttttagttccgactcgtgaagcttttgcttctgcgctatttggggttcttcgtaataagaatgtaattgacagcccggatgagcaagaagggcgttatacatattcaaatgaaattttaccaatttcaaggtttaatagtgcaagtgatcatacatatagcgaagctttttatttgcaagatttagaggggaatggtattgaaatttatgcagaccgtccgcgtgatcaatggggagaagggtcaggaggaagtacaccacttgatttaaaagaattggcgacactcgttgattatgagtttgatggtttgcctgctaatactgtcgttgggcacgtacatttacgaatagctgatgtagagaaatcacatgaattttatgtggaaacagtaggttttgaagtacaacagcgtgaagaggattgcttatttatttcagcagggggatatcatcaccatattggtgcaaatacgtggaacggagtaaacaatccacacccaccagtatatgcaactggactaaaggtatatgctattgtactaccgcataaagaagcgttagacgaagtgaaagaaagattaatagaaaaacaacatgaaataaatgaaactacaaatgggtttgtggtggtagatccaagtggtattacagtgcagtttgaaatagaagcagtgtaaaataagcgagaaagtgtataatcactttctcgcttatttgtaattattcatagctcaatccaatatcttcttactatattcccatcttcctcagtgaaatcatcatcacgaatcccgccgttatgcaaaatcgttttttcagaagcggtattcacagcgtcgcaaacgacaagtactttcgtgatgtctaactccttcgttttttctaatgataatgctagtaacttcgtagcataaccttttcttctttcagaagggcgaatgccataaccaatgtgaccgccagcgttaaataaatgtttggttaaactatgacgtatattaacagctcccacaattttattttcatctgtaacaagccaatatgtagagtctggtacccaagtttcagggatatttattccgttatgcgcatcgagaagttcttgaaccatagctgggaagttggcaggattttttgagataacccacgggatcattgtttcaccgctatctttccattcgttatagaaatctaagtattcttcttgtaaatcagtagtaggtgtgagtaatgagacgttcattgttagtaagctcctttatttatatagtttttataaaaaattacgatacaaagtgaaagcgttttctataatttctcaacctaatttcatgtaatccatctttgtttttttagaaaattagtggaggtttaaaattagaagttatttattttatgttaatatttaaaatattaacataaaacggtcggagtattaagtatattttagcggtatccctacatgtaaataaaaggatgtttgtgataatttttgttttatctatctataatgaatgaaggggggaagtgcccgtgagtgtagattttgattttattatacgaatcggtgttgctggcttgttaggagcaatgattggtattgaaagagaaattcgatcgaaagaagctggattaaagactcatttcctcgtagcggtaggaagtgcgttaataatggttgtttcgaaatatgccttttcagatattgtgtttgaagagcatatatctctagacccaagtcgtattgcagcacaagtcgttagtggagttggttttttaggtgcaggcacaattattattcaaaagcaggcggtgaaaggattaacgactgcggctggtttatgggctactgccggcataggattagcaattggagcgggaatgtatgtagtaggcattggagcgacgattctcgttttaattggtttagaaattgtaagtcgtatttttaaggtgcaatttttatttccacaaaatataacagtgcaaatgtttgtaaataaacatgaagcggtacaacaaatattagaaacactacaagtgaaaggcatcccaatactctcatatgaggtggaagcttcacagcaaggtacagaaactgtttataaggtagggatgcaactgaaaaatatatcgtcagaagaaaagaatgagtttattcagcatatgcaaacattaccggaagttacatttataaagttaaaatcatagtgttgaaaacgaggatagatgtagcaggaattttgctattatctatctttttttgatataaaatgcacggaaagtcaagcgttaattttatatggaatggatacatgtgtgaacgttaccttattttttctcaatacaggacaaaaagtaaaaatagtaaaataatggagcgggacactaaaaatgtaaggtaggggagagcatgaaaggctattcaaagaaaatgttagtaggggtaagttttgctagtttaatgttagggagttttcaaggggtaagtttggcagaagatactaagggagagcaagtttcttatcgaaatgtgctcaaaatggagccagtcggtgtacaactaccagtacaagaattagctcattcatcgaaagtgctcgaaagcaagtcttttgagaaaaggttacaatttgccgatttatcacaaagaccacctgaggtgaaaaaagaaagtaagcaattagctgtagcgaaaacttatacaattgccgaattaaatcaattaagcaatcagcagttagtagatttacttgtaacaattgattgggagcaaattacggggctatttcagtttaatacagacagtctagcattctatcaaaatgatagtaggatgcagacgattattgataaattgaagcagcaaggacaagcctatacgaaggatgattcaaaagggattgagacattagtagaggtattacgttcaggattttatttaggattttataattcggaacttagtaaattaaatgaacggagttatcatgataaatgcttacctgcattaaaagcgatggctaacaattcaaattttaagctgggtacattagagcaaaatagagtggtatcatcatacggaaagttaataggaaacgcttcgagcgatgtggaaacgataacatcggctgcaaagatttttaaacaatataatgataatttttctacattagtagataatctttcagctggaaatgctatttacgatattatgcaaggtgttgattacgacattcaatcgtatttgtacgatacgaggaaagcaccgaaagatacagtatggtatcagaaaatagatagttatattaatgaattaagtcgttttgcattaatgggaacgattacagcaaaaaacggttggcttattaataatggcatttattatacaggtagactcggtatgttccatagtacaggaactaaagggttacaagttgtaacagatgcgatgaaaatgtatccgtatttaggggagcaatatttcgtagctgctgagcaaattgcaacgaattatggcggaaaagatgcaaatggtaaagtggtgaatttagatcaaataagagaagatggaaagaaaaaatatttgccaaaaacgtatacgtttgatgatggagcaattgttttaaaagctggagataaagtgacagaagaaaaagtaaaacgtttatattgggcggcaaaagaagtaaaggcacaattccatcgtacggttgaaagtgatcaacctttagaaaaaggaaatcctgatgatgtattaacgatggttatttataatagcccagcagaatatcaatttaatcgtcaattgtacggttatgaaacgaataacggtggtctttatatagaaggaacaggtacgttctttacttatgagcgtacgccagaagaaagtatttatagtttagaagaattattcagacacgagttcacgcattatttacaaggtagatatgaagtaccagggttatggggacaagggaaaatatatgaaaatgaaagattatcttggtttgaagaaggaaatgctgaattttttgcaggggcaacgagaacggataatgttgtaccgagaaagagtattataggaggattatcttcaaatccagcagagcgttatacggcagagcgaacgttaaatgcaaagtatggaacgtgggatttctataattattcctttgctttacaatcgtatatgtacaataagagatatgatatgttcgataaaatacatgatcttattaggaaaaatgatgtaacagcatatgatgcatatcgctctacattaagtaaagatgcgaatttaaataaagaatatcaggactatatgcaaatgctagttgataatcgtgagaaatataatgtgccattagtatcagacgattatttagcgaatcatgcatcgaagccagtttcagatattgcagcagaaataacagcggaagcaaaattgaaaaatgtatcagtgaagaaaaataaaccacagttctttaatacattcacactacaaggaacatatacaggaactgcagcaaaaggagaatatgaagattggaaaacaattacacaaaacgttaatgatacgttaaaacgtttaagtgcaaaggaatggacaggctataaaacagtaacagcatactttgtaaattatcgcgtgaatacatcaggacaatttgaatatgatgttgtgttccacggtattaatacagaagaaggtgcagagaataaagcaccagttgcagttataaacggtccgtatagcggaaatgtaaatgaagcaatttcatttacaagcgacggatcaaaagatgaagacgggaaaattacttcgtataaatgggagtttggtgatggagcagtaagtaatgagcaaaatccaactcacgtatatacaaaagaaggaacgtatacgacgaaattaacggtaacagacgataaaggagcaactaatactgctacagcgactgtaactgttcaaaagaaagaagataacagtgtagaaaaagaaccgaataactcattccaaacagcaaacaaattgcagttaaatcaagttttacgtgctagtttaggaaatggcgatacaagtgatttctttgaaattaatgtggagactgctaaaaaccttcaaattaacgtaacgaatgaaaataatattggaatgaactgggtactttattctgaagcagatttaaataattatgttacgtatgctcagcaacaagggaataaactagtaggtagttactatacgtatccagggaagtattatttacatgtgtatcagtatggcggggggacagggaattatacggtggaagtgaagtagtaaaaggggagttatcttgttcaatgaatggaaaaaggtctgtactttaatgaaaaaacaactgcaggcaatgtctctaatgataataacaaattaagtgtcgcgagatgttatatttatattaaaccaatctaatcagtaaataagataaaatagatgaactagtatttcatcacgatgtaagaaaagttataaatattaagtgtttttaattgaattaaactaaaggatcagagtgtatctgtaacaatagataggctctgatccttattatatttaattaacgcatatgaatttaagataattaataagtaagctagctagcgggattcttaaaattcatttatgtaattaactaaacagaaaattgttatcacattagcaagggatactaatagaaaagcgtgtccctttacctaattcactctctatttctatatcaccgtttaattctctaataatactataagcaatcatagtaccaagcccagttcctttttctgttgttgaatagaatggcaaagcaattcgttttatttgttgagatgacatcccaattcctgaatcaataatatcaattatgatatttccttttactttttgtatatttatttgtaataatccaccatttttcatagcctcaattccgttttggatgatgttgtttagacagagtttgaatttttcggggtccccatttatataaaaggaatctgtactattttgtttgatttcaactttgtatgatagagcgagtggtgaaatagtatctttcacctgatttaaaatgtgattaatatctattttttcttttagggtattctgtggtttggttaaagataaatagttattaatagtagattgtatttgctgcatttcaattaacatgatttctaagtattgatcctgagatagcttagaggcatgtttttcatttaataattgagtgaatccatgtaccgtggttagtggattgtggatttcgtgtgcaattgacgctgctagttcgctagctatataaaatttttcagctcgttgcagtttttctttcattttatatttctcaatcatttcctctataaaataaactgataataatactgtgaaaatattaatgactatataatttaataaaaattctatgagagtagagtctattttacctcctgtatttatttgagttacaataccgcaaatagaaagggaagctgtacatactaaaataagaagtaagcttaataatatctttttttctttaaaatacataggtaataagtaacgaaagagcattgttataacagaaatgatagtaaagataataaatgatggaagaacgccatttccgcctaagtaaaaccggtaagaaagatataaaattcctataaaaacaatgttttttgtatttccatatagaaaaactaatattataggaataaaacgtaaatcataaataaatcccacatgtaaatgaaaaggaaaagtcatacaaaaaataatagcaatggaggaaaggatagaaaataacatattattacatgttattttttctttaaactctagccaaaatacgtgatagctaaggatacaaattattataataaaggtatttaataaaagagtagaaattcccatagttttgcatctccgatagtttgtaagtagaattatgtatgagttggacatagatgtttagtattagtagactttttatctaaaaaaggaagggtacttgaaaagtgctgttatattactcgtattaaaattgataaggaaaatagaaaaaaataatagataaaaaatctatttaaatttatgtacatatgaaatcataaactaacttttgtataggtgaaatttggattgagttactgataaaataagtctttttaagtatgaatattctgtgaaaaagatatgcgtggtgactcctgttttgtagccttcgttatattaacatggaatatatcaaattacaaagtgaaattttagaaaaattttattagtacattttatctgaaatagaaatgctatttatttgagtattttggtacttactcgtataaaactttgttagaaaaagactttaaaatttacatgttttttatgaagtgtaatattgtagctttatctatggggctttctcaataactattaaggcgaaaagttaaaatatataggtttatagatatgaattattacataaaaacgcacttaaaaaaggatgtatgatggtaatagaatacaaacatcaagggggaacttaaaatgaagttaaataaactagtgcttagttgtggagtagtttcagcattaacacttggtgtgttagggaataatacttatgctgaagaagtacacaaaacgaatgatccaattcatgtagttgaacatgtttctgcagacttattattaacccaaacaatgaattatagtggcgaggctgaaacttctttcgtatatgatgggagtactgacttaagcttctctatgaaaaataatggtcaaaatacaatgggatatagtgtaaaaggtccaaatacagagctaattgttggtggttatataaaacctggagaacaacaaattaatgttacaaatgtacggaatgctttatctccattaccgaatggaacatataaaatttacgtttcaaatgatgatggttctaaggggcaattccaagtttcagtaagatctgtgaattaaatttaaaacgctttgtttttaagttaatttaatctttgcttattggaaagaagctaaaatgaattgagaattaccgataaaaatgaaaacgagcaccttatctaattgtgagagggtgttcgttttttgctattaaacagaaaataattataaatatattttgatatccccattgctaacctactagattgtgtcaacgagagaatgtctactataaaagatattaaaataaagatgatgtaacattccgctaaattatatggggaaatagaaaaaccacccttatatgagtggtttttagtaattatttttaggttatacatttaaaattaggctaagttatagaaataataaacatttaatctgttgttattattttggttctggataatgattgtagtatgagattctaataaattcttggtagacatttgttaatttggcatctctaagagcatcgttgaatttttgcatacgtacactcccttgagcgtagcctccacctggagtataagggtttctagcttcaaagtcatccaaaaatacttttaattttttatagtcttgagattgatagaaagccacagcctcttcaggagtgacatcaaagtaagaggatgacgttgagttataagaagctgcttgagcagtaggtgcctctagcatagttgcagctccaccgaacatagtaagcgccatagaagatacaataatttttttaaacataataaaacctccatgtagaatattagattaatagtaatcctgtaatcattatagttacaatgaaaatgattatcaaatgcaatattgcataatatatctcgttatttttgggcagtaagactcccgcacaaaaattcaatgaaagtaaagaagttaggtgggaatcgggcggattaaagtttcactttattatttgaacgagaagtcacctttatatttaaatgaaggagtgtaatagattaaaagaggtgtataaattactcaggttaacaagaaaatgaaaaggctatttttaataggggaaagcttaataactggagtaaaggaattgctatttatatatttaacatacatatttgtcttttaaattgtaggcgtgttttagaatttgtatatagtaaattcgttaaaaaacttgataaataataaaatgtgtaaattttttgactattttattaaaattatttaatatttgtaatttattgttttataatgataattgggtcgatcgtgaatgttttagatattgcgatatatactcggattaatttattttagggaggttacaaaattgggtaagagagtcattataagagtttttacattattatcagtactggcattattccttaatgtatttttacctagggctagtgcagaggttatgacgcatgagaaatattcaatggactggagttatagtaatagtctaggtaagtacattcgcactgaaatgattaaaaattcaagtggtcaaattgcttattgcttaacccttggattaaaatcaccaaatggtgaagatcttcctgaaatggggaaaacagataatgtagtatatagagtcttattaaatggtttcccgcaaaaaagtgctgaacagctgggagtagctaataaaaatgaagcgcattatgcaacgcaacttgcggtttggaatgcattaggtcaactcgatgtaaatgaattaaaacatgagaataaaaatgttgaaaaagcagctaaggctattattagtaatgctaacaatagtgaagagactcaagatgtttttatgaatgtgattcctgctgaaaagcaaaaagcagaattaaagggtgaattcttcgaaacaaatctatattcagtacaaacaaatgctaagagtggttcttataaggtagtagcgaaaaatgcacctaatggagttagaattgttagtgaaaatggagaagtgaaagatcagctttcagttggagaaaaatttcgtatccaaattcctaagaatacaaaaacgggtgaatttaatttaagtgttgctgctaatttaactcaagttcaagcaattgcttatcgtggtacggatactgttcagaatgctacagtactattagagagaaatgaagaaaagcttagtagtgatcttgcagtaaattgggaagcagctggttctttaaaaattaaaaaggttggagaaaatggagaagttttagctggtgcagtatttgaggtctttaatgcaaataatgaatcagtcggaaaaatcacgactggtgctgatggtatggcagaattaaacaacttaccaattggtacttacacattaaaagaaattaaagcaccaacaggctatgtttcagatgataaaccacaaactattgaagttaagacaggggaaacaggagctgtccaaatagtaaataacaaagtaaaaggtaacatcgaaattaaaaagcttagtgattcaggaaagattttaccaaatgttgaattcacagtcttcactgaagatggaaaagaagtgaaaaaagtagtaacaaaagaaaatggaattgcaaacgttgaagatcttacgtatggtaaatattatttcttagagacaaaaacacctaatggatatattggaaataaaacaaagtatccttttgaaattaaagagcacaataaaacacttacttttacagtggaaaataccgaagtgaaaggtagtgtaaaattactaaaagtagataatgaagatattagtaaaaaattagaaggtgcagcattcgagctaaaagatgcaagtggaaaagtagttggggaatataagacagataaaaatggtgagattaacgtcaaagatttagcgtatggtaaatattcatttgtagaaaaggcttctccaaatggttacgttcttgttaaagaaccgattatgttcgaaataaaggaacatggaaaggttattgagttattggcagttaatcatcttatcaaaggtgatctagaaattacaaaggtagatgtagctgatggaaataacaagcttccaaatgcagaatttacgatttataacgaagcaggaaaagaagtagtaaaaggaaaaacagacgataaaggaatcgctaaatttgaaaagttaccatttggaaaatacacatataaagaaactgttgcaccaaacggttatgtattaaatgaagaaacgttctcttttgaaattaaagagaatgatcaaatcattaaacacattgtcaaggatgaaaagattccttcaataaaaacaacagctactgataaaacagatggtacaaaagaaatgcacacgtctaagtctgtaacaatccaagataaagtggaatacaaagacctacaagtaggtaaagagtacactttaaaaggtaaattaatgaataaagagactaataaaccattcgttgtaaatggtaaagaagtaactgttgaaacgaagtttacaccaaaagaagcaaatggttctattacactagatttcacttttgatgcaactggtttagaagaaaaagaagtagtagtattcgaagagttactgaaagacggaaaagttgttacgacacatgctgatatcaatgataaaggtcaaacagttaagttcgttaagccatcagtaaaaacgacagcaacaaacaaagctgatggtggaaaagagattcattcaaaggattctatcacaatccaggataaagtggagtacactaacttagttgttggtaaagagtacactgtaaaaggaaaattaatgaacaaagctattaacaaaccattactaattgatggtaaagaagtaacagctgagactaaatttactgcaaaagaaaagaacggttttgtaacattagactttacttttgttggtgctgaacagcaaggaagagaagtagttgtgttcgaagacttattacatgaagggcaagtaattgcaactcacgctgatattaacgatgtaggtcaaacagttcgatttgtagagccttctattaaaacgacagctacaaataaagctgatggttctaaagagttagacgcttctaaaactgtaacaatccaagataaagtggaatacaaagacttaatcgtgggtaaagagtacgtagtaaaaggtaaactagtggataaagcaacaaacaagccattattagttgatggtaaagaagtaacagtagaatctaagtttactgctaaagagaagaatggttctatcacattagacttcactttcaatgcttctgcattacaaggtaaagaagtagtagtatttgaagaactgtatcaagataatatattagtagctattcacgctgaaattgaagataagggacaaacagtgaaatttaaagagggaaaatcggaacaaccaaaaccagaacacccaaattcaggtaaaaatacgccaacaccagagcaacctaacgagcaagtaaaagaacaaccacaacttaagaaagaaattcaatctaaaattggatggttaccgcaaacaggtactaatcttacaagttggatctctatggctgcaggagcattactgttaattgttggtggagtgattttcttaaaacgtaaaaatgcatagaaattaaaaaataagcacatctgtttttataacaagatgtgcttatttttatcattttagccaagaagactcctatatttaagcgtgaatggcatttaaaatagcaaccatattttataggtaattttgaacagttaaaagaaatattacaggagggtgaaaagcaaggagtttttcatttcttctccataaatcatacaatacattggatcacttctattgttttatttccaaagtttaaaaagtttattgattttttaggaccaaatgaaacgaatgatacaaatcatgaatggatgccagaaaacttagtggacaggattgttactgcattaacagataaacctaatgtgtaaattattcagtgtttatgaattctattattactatttaaagcctaatttctcaatgtattgtagagaaattaggctttttttatcaattcattaaagtttttataattcaaggactcaagttaatgattatattttcaagtattcgttttgagctacatagatatagttttcgttgcaactgtttgttgaaatattttatcatgctcaacaataaccattgtgggattaaattgttgaataagttcttcaatctgcatgcgggaatagatatctataaaatttagtggttcgtcccatatatatatatgagctttttcacataaacttttagcgataagcagttttttcttttgtccaccagaataatgagatatatctttttcaaattgaattcggtcaaagtccatcttacttaggatggacttaaataaggtttcatcaatcttgtgctcttcaataaagcctgatagtgatcccttcaaatgagaagtatcttgttggacataggaaatgatgagtcctgtacctaaagtaactaagcctgtatgctgtatcggatgtcctagaattagttttaggatactactttttccgctcccattcgttccatcaagtacaattcggtcaccttgttcaactatgaagctaatcggctcattcacaatttgatcattgtacttaacggacacgtcaactaaagtaaccaattcatttgatttaaattgcaattgttccaattttaatgactcagttttttccgcattttttagtaattttgatttttcctcaatagctttttgttgccttgattcaaggttttttgctcttttcatcatcttggctgctttatgtcctacaaaccccttatccaacttagagcctgaattcctcgttccattttttgaagcttctacgtcattagaccaacttgctgaacgtttggaagactgttttaatcgccctatgtctttttgtagacgctcatttgtagccttctcgtgttcttgctgtctatcaaaatttaacttccaagaagaatagttaccactttgaacttcaatatttgctctattaatagataggatatggtcaatgcacccatctaaaaagattctgtcatgtgaaattaaaataaatccttttttcttccttagataatcggagactatctttcgtgcatctgtatctaagtgatttgttggttcatcaattaatagaaattgacccgcatttaaaaacagtgcagcaagcaacacttttgtttgttccccatttgataatgttttaaatggtctgtacatgacctcagcatcaacatttaaataggatatctcacgtagaagttcccaatctgcggcttggggacaaatttcttcaaggatttcatgagtgaatttgttcttatctgaaacagagtaggggaagtaattgaattctactgaagcaaggattttcccgctatactcataattccctaacaataaattaaagaatgtcgttttacctcgtccgtttctaccaataaatcctagcttccaatccgtatctatttggaagtttacactttcaaaaatattatcaaagctacctgggtatgaaaaagttaagtcttggacctttatcattgacataataattcctcctttatatatcgaaacgtttcatataaagtcggaacatccatccattttttaattcctctatataagtttgatggatattaacgacttatatagagcattacatgtgtaacaatagtatctgaagtactcatttttctcgctcctttatttgtgaagtacatttaacaattagtaagtttcaactaagacaaacgggaataaaaaaatcccccaatttgtaatcggaaggattagtctttcgtctatacttaataagtacttattaatcatttgaatcatgacaaataaagtatgaactgaattttaaaaatggatagactaaccctatattttgtagtttgaagttataaaattcaacttaaaatataaattagttaatcattattcatccatcattcctttcataattctatttttagagtaacattctttttagggagatgcaatattagcttcaatttcatctaattctaaatcatttataattctttgagtaaggagataaaactttaccgccctttttataaacatcacatttttgttcaataggtcatgtcttttgtccgttaaaaagggaggatatgaaattgacatcaactttttatgtaactataatagttacagttggtttcgtaaactaatttgaatttctattttaatgatagtatattttcattcctttttaagtgtgacagatagcaactataatccaatagaggagtagattctatctcatatgtaaagagtagataagttgtacccgccaaatttacgatgcgcaaatacttaaaaaactacatttttcagcttatcctttttagaatcctcagtattaataattgtaaacatctacaaaaagttaacaagactgttgtatgtagaaagaaatcttttaaaaaggtcataatatggataataggtagcacacatttaaatttagtaggagttgtgccactatcaagacattttttaataaaagtatagaaaaaactcaagaaggtgagtccattgcgtaagcatgcatatgtgcaattttatgtattgatattggctttaatagcttatataagcttttgctttatatttttatttgtttttccgaatcattatttcgtatcagattttaatatccgactatcatctttagtcgttgaaactactgtatttatctcattactgtattctatattatcccaaaaaattaagttaggagtattctgggtttgcattactattgcaatagggtgttttttgataggaaatttcatatccgcttttcaagtacttaatgtagaattaccaatacaaaattttaatatttctgatgtatttctactgtttttcttattcttctttctttttgcgttcttttataaaattatgatggaatgtaataaatgggagaaagcatatttactttgtgatttatgcattgttgttactgctatttttacattagagtggtacctatttaataaaccatctgcaaatattttattcttatcaattggagatgtttttctctcatttatttttccgattatagatttattgcttctattacttggagttacactgatctttcgacctgctattttcaatgcaaaaagtaaattgtttatttttatcctagtattaactggattggctattacggactatttgtatttttacttacaaggtgatttgtcagagcgttcagttatatttttaaggtgtttgtatagagttttcctattatttatcgctattgctgctacaatcccatgcccatcaacttaaggatagaaactctacggttttccattaattgaaatgaaaacaccccctatttatataaaaaactccccttgacttctcatagttggtctttcaaagtaaaaaaacacacccatccctaggaaagggacgaatgtgttttcgtggttccacccttgttccaatctagacgtatttcctcctagattgctcaagttcagataacggctgataccgccaataattactagattactcgttcactattgaagttcaaaggtggtaaaatcatttctcgtgttaggaagctcacacccttggcttccctctctgtaaaccgtaaaaatgatttcgtgtccttatcgttactttttcgttcatgtttatttgttaactcattatactcgcataaaaaacaaaatcaatactattttttaattattttaaattttcaatctcttataccataaaaaacacactcatccctaggaaagggacgaatgtgttttcgtggttccacccttgttccaatctagacgtatttcctcctagattgctcaagttcagataacggctgataccgccaataattactagattactcgttcactattgaagttcaaaggtggtaaaatcatttctcgtgttaggaagctcacacccttggcttccctctctgtaaaccgtaaaaatgatttcgtgtccttatcattactttttcgttcatgtctatttgttaacttattatagttatcaaatttttaaaaagcaagcctatttttactaactattttcaaaatgattttttattatatttcacaatagcattatgcaactgccactcaatttacctattttgtcatttctccagttaataaatcaacggttcatatataaagtgaaggctaataatcagtggggattttgttcatccccactgattattagccttcaccaatcgggcttttacgggcagttgatccccacctaacttctttgctttcgctgaattttgaggtaggggtgttactgcccgttaatgcgggataaatccccattctaaaacccgtacatactcaccttacaaaattatatcaataaaatttttaatacaatctttttgtataactttcttctaaagaacgtgcaacatcttcttctgaagcattcactttcgcatgctctaacaacatttttgctgctgaaggtaactcttttttatttaaccaagattctggatcccatatcttcgaacgaataaacgcttttgcacaatgaatgtaacactcttctatttcaacaacaattccaagcaacggattacgtccattcgcctgcatttctttcaaaatttcttcatagtttgtaatatacgctcggccatttattctaagtgtctccccaagacctggaataaaaaagagtagtcctacacgtggatttgaaataatattcaaaatggagtctatacgacgatttcctggcctttctggaatgataattttattattattgagtacgtatacaaatccaggtgcgtctcctctcggcgaggcgtcacactcccccaacttatttgcagtagataatactagaaaaggagatttagaaaggaaatctacacaatggtggtctaatgatgaaataacttttttcaatgctcgctcacttggtttccccaatattttccgtaactcttcctctgttgaaataatcgattttatttccatacgctctatctccacttataatcgcccctttttctttattttcccaaaattcaatacgaatattgtataataaaatttgcagaaaggggaattaaaatgacagagtggttaacaatatttgattctgaaagaaatacacttgggaagaaattacgcgatgaagtgcatcgtgacggtgattggcacgaaacatttcattgttggtttgtagaaaaagatgctaaagatatattcttatatttccaattacgctctaaaaataaaaaagaagctccacttatatgggatattacttcagctggacatattatgcatgatgaagatgtacaaattggtggtcttcgtgaaatcgaagaagaattggggctttcctttcaaactactgatttagtatacaaaggaatctttaaaatagattatgaaatttcaaatcttactgatcgtgaattttgtcatatgtattttcacaatgtcatcaatccacttccattcgcaccaggtgaagaagtagacgatgtgatgaaagtacatgcaacttcttttctacaactattaaatggtgaaatttcatcttttacagctagttctgttttaaacaataaaccaattacaataacatttgaagatatttatccgtatgatcttgcatactatgaatttgttatagagaaaggaaaagaattattaaaaaataatagtttataaataaaataggactcttagcataatattgcgtagagtcctattttttattattgttcaagtatctttaatttattctctacttgtataaataaaagaataattaataacagcataaccaccataatcgctattattgtatgtggatatctaaacagtatactaataacacttccaattaacatcatgatgaatccgttttgcttcatcacttctgcactatacctgttacccgcatcccataattccttatttttcatagatcgtttcgtacgataaccatatgccgcattaatatcggtcggtggatttttttgaagaacaattgccgcaagtataaatatagtacctattaaaatactcattcctatgtttattagtgcatacatcaattatatcccctcctaacttacaccttcattatacgacatgacccttttttcaaatttataacacattcaatttctttcttttgatgtgtggaacatacttggaagtgttacaaaacgtgcccctttcgtttttaactgcggaatgattttgtctagtgcatctacagatccttgtaaatgcccacctggtgttgaatgctgaaggatgacacttcctggaaatgaattccctaatacattatttgtaatcgtatcagcgcttacacctttccaatcaactgtatcaacactccactgtacaatcataaaattttgctctgttgcccacttcaattgctcttcaagtatttcaccgtatggcggacgtataaacttcggtgcataaccagctaaacgatttaatatttcttccgtttttattatttgattacgatactcagcatcatttactttcgctaagttcggatgactatacgtatgattaccaattacatgcccttcatttgcaatacgctttactacgttcggaaatttttctgcgttttcaccaagtaagaaaaaagtagcttttacattatgttgttttaacttatctaatatttttggcgtgaattctaaatctggtccatcatcaaatgtaagagcgacttccgctttattatacggtcctgaaaatgcgtacgcatatttttcgacccacgaaaatggtgtccacgatccacgctcatatgctttcatttgtacttcatagttttgagggatatatgcgtatggcaatgaacttatatagtctccataataaaatgagttatatggcatataagcatacgaaacatctcgttctagtccccattgatatggagcaaacatttgtggcgaataaaaataatacatgataaaaaaacctccctaatttttcatatgtgattcctctgcactttgttagagaaattgttattcataaacaaaaaataagactgtccttaattaggacagtcttgctgctttatattattaatacatcgatgtactatctttcggcaaagctttcacatgttttaaatagttcgtcactttatcatcctcatcttgcggatattgatattcatatgtgttagcgatttcgttcgccacttccctaaataaatcacccatgacaaagaatgactcccatatgttttcatattctgcattagaaaatgtccttttaaattgctcccacatatcttcttcaatatattgctcgaaatgctttccaaacttccctgtattaactgtaaagtctgttttcataccaatatgccattctagcattacgatgaacatatctcgcactggtccttcaagcattccttttgcataagaaagctcttctctccatagcccttttgccacattcgtactacaccaccaaaattcattacagcaatccaaaaactctttttctgtaggcttttttattaagtaatctttatcgcttgctggcgggaatccttccatacaattatctttatcaagaagcagtttacttaaactatcttgtccaacgaacttttttattaactcaactggaactagcgttaaatcaatccgattcccatccatgaactgcattaaatatggaaacttcccatcttcatctggttgaactaacgacatttcttctggcatttgtactatcattatttctccaaatctatgaacccaattatgattagacgtaaaagattgtatatcatttacaacatacataatatcatagtcttgaaaacaatctcttttcacatttggatttacacgcgatccattcatgataactgctcgaattctttcatcctcttttgctatatttataattacgtctaacatttctttttcagttctcatctacttatatcctccaattttttaatatataatatagtgttatgtatattggaggtccacgagctaatctcgttatacacgatacatgttataatttttgaaacttctttttcatccctttttcctccttacatcactcttttacaactgccatccctttcaatttcccaatgctttctaccattcacttttaattataccgaaaattctgtctcgaatacaaaaaataaagaagggacatctaccccttacagaatagatatcccttcttttaaagttaaatttaattcctatggattagtagaccaaagcccagcagatttaataaatgtacgtttatttaatttcagctgcgctacgataaattctgcaatatcttctgcttgcattactttatcagggtttccatcagttaatcctaaatctacagccatatcagttgctactgtacttggagttaaagctgttacacgaatgttatgtttgcgaacttccatcgctaacgattctgttaagccaaggacaccaaatttagaagcactatatgcacttgttacaggtgcacctttttgtcctgctgtagatgaaatgttaatgatatcaccagattgttgttcaatcatgctcggtaaagctgcacgagttgcatagtatacacccattaagtttacttgaatgattttttcccaatcagcaacgtctagttctaaaaacttaccgaatttagaaataccagcgttattaattaaaatatcgatagatcctaaaccattttttaacgtttcaatcgcagttgttacttcttcgcatgaagaaacatcagcagttgcgataacagcttttacaccttctgcttctacttcttttgctacagcttttaagttttcttctgaacgagctaataagcctacatttacgccttctttcgctaatgcgattgctacagcgcgaccaatccctctacctgctcctgtaattaaagcatttttaccttgtaataattctgccaagtataacactccttaatcatctcagttatgtattatattaaaattgtatctatgtttatgtaaaaaggcaatgatgcactttcatgtgcgtaggttacttgtaggtaactatagaaagtttttatttataagtttcatttttttaccattattcatgtaaaataaaaacaaatccagcataggggagtgtatgagtatgaaaagcgaaggaaaagcttttcaatataattgcagtaacagtaaatgcatttttaaagagaaatagtgttagaaggttctccttctaacactatttctcttcatgattcggcatacgcacaataaattcagtaccttttccttcctcactctccacttttatctctccttgatgaaggtcaagtactttctttacaatagctaaacctaagccacttcctccataggcacgatttcgtgaagaatccgctttataaaaacgctcaaaaatatgttgtttctgttcttctgatataccaattcctgaatcacggatacgcacttccactactgtctcatgttcctttaactgaatagtaatcgtaccaccgcttggagtaaatttaatactattatgaattaaattaatccacacttgactcatactttcttggtcagcaataacatatactttttctaaatctagttctaactcaatttctttttcagcccagagtggttcactatttaacacaatttgctttaattgttgatctaatcgatagctcactctttctggtgtatactcttctgattctaaaagagttagctttagtaaattttgacttagtttagataatctcgttgtttcagtttcaataatggtaagataatgctttcttttttcctcagaaagattatcgtcttgtagtgctctagcaaatccttttatagaagttaacggtgactgtatttcatgagaaacattcgatacaaactcttgtctcattttctccatcgtattcagttcatctgtcatatcatttatactttttacgagcacgccaatttcaccatcatacttttcttcatttcttatttttacggagaagtctccttttgcaattttttgtatcggttcaataatagtccaaatcatcgcctctcgttttggtctcattaatattccaatcaatgtccaaataagaataataaagacaaaaccgaccatatcactaattagaaaagcaacaaacggcgatacgtttacgtcaaaagcattcaatatactagttgctacataaaatgcgatagaccaaattatagtaagaaaagaaaagagcgctaataccgctccaaatactttcagcatcttcaacttactcattcgttttctttttctcatttacttacctctaagcgataccctaatcctcttattgttttaatactaaatttcgactgctcttcttgaaacttctcacgtaaccgattaatatgaacgtctagtgtacgttcattcccttcaaaatcatatccccatatttcttcaattaattgctctctcgaacaagttcttcccgatttagaccctaaagtaaagagcagctcaaattcttttaacggtaatgtaaccgtttgttctccagatgtaacttcgaatgttttacgatttaataatacatttccaacttgaatcgattgggaaactgtaatttggtaacgtttcaataatgcctttactctcactactaattctatagggtcaaatggttttacaagataatcatctgtcccaaggtgaaatccttttactttttgtgatgtttcccctttggcagttagcatcagaaccgggatatcatagtattttcttaattcaaaacatacatcaaatccatccatatttggcatcatgatatcaagaataaccatatcgacttttacgtcatccattttctgaagtgcatctactccatcaattgcctcatatgtttgaaaaccttctcgttctaaaaatacagaaacgagttctctaatgtgtggatcgtcatctactattaaaattttaggtatcaaaggaaccatttcctttctacttagcatctaatatattgtttaaaaatgaatcatcagtggagtaaaatcccactgatgattcattttataatgcaccctctttaattttcaattgctgcgttgcaaactcacgatacatatcatgcgtctgtaataattcatcatgcgtaccactacctgtaagattccctttttcaataaagacaattttatctgcatctacaacagtagaaagtctatgcgcaatcactaacgttgttctgcctttcattaagttatttaacgctttttgaacgacagactcagatttactatctaagcttgaagtcgcctcatctagcataagaatttgcggatttcgaagtaacgctcgggcaatggcaattcgctgtctttgtcccccagaaagcttcacaccgcgttctccaacttctgttgcataaccgtttggtaagtcatgaataaatgcatcaacatatgccattgctgctactttttcaatttcttcatccgttacttcgccctcgacgccataacaaatattatcacgaattgttccatcaattaacggactatcttgtgatacgtaaccgatttgacgtcgccatgactgtaatgaataactcgtaattgattcttcccctaatttaatggcgccactagttggctcataaaaacgttccaataatgagaataaagttgttttcccactaccacttggtcctacaatcgctgtcacttttccagattcaattgtgaaatcaatatttttcaaaacttgctcttcttcgttatactcaaaatgtacattttcaagaacgatcggttgcttagcatttgtcactttcacaccagtttcatgatcttctacttcatattctaaaatcgtactaattctttccgttgcaccaattgccttttggaattgtgtaaagaacatagataattgactcattggcattacaatttgaactaaatacaaaataaacgctacaagttcaccggttgttaatgcaccgctagaaactcgcatcccgccataccctacgataataacaagtagtgccattaaaacaaacgacataactggcgaaattaatgcttgcacttttccttctttcaaaccaaattgtaataacttttgtatacctgtattacccgtttcatattctctcttttctgtatttgaagatttcactaaacgaatttctgataacacttgcgttaacacacttgtaaaagatgcagtttcatcttgaagtgcttttgaaatcttatacatttttcgtccaagtggaactaaaattaacacagacaacggaataaccgttaaaagtaacgcagtcattttccaatctaaaacaaataatacaattaacgatccaacaattgaaataccacctgttaataagtttgacaaatgctcagaaattaacgttttcacaacacctgtatcattcgtcatacggctaatcgtatcacctgttctattttgatcgtaataagataccggcaagataagtacctttttccacaaacgttctcttagtcccgctacaatcttctgcccaatataatttagtaaatatatagacaaccctgccgcaatagtttgcattacaaagaaagcaattaacccaacaatttgtcctgcactaattgaagaaagcgaaaaattatctactaatccttttgtcagcataggaataaataaactcgctcccgtagaaagcaaactcattaacaacgcaaaaactaaaattcctttcggaggatttgtatcttgaataaggcgtaaaaactgcctccaactcccttttttctttatttcatttctaacttccattcctgttcatctcctcatgttaaacaaaactgttctttctaaaattagaatacgatacaaatgtaaactgaatgtaaacacactttttctatttttacaaaatatacataaaaactcatctttacaacagatataaacatctgatattattacctggtacttaatattattctatgtaaattatagataaataatttaaaacacgatataaatctccagttagtgaaaggagtatcctttttgcaaacaaatatacattctgaaaaggaaacaattatttttattcatggattagttggcaatcgtcgcgccttcaaaaaagagcaaaaacgattttctgcctcctacaacattataacttatgacttattaggtcacggtgatgataaaggagaagcaatcgacttttcattacagcgcctcgtagatcaattattaaacttatatgaacaagaaggtattaaaaaagcacatatttgtgcgctaagttacggctgttacatctctacaatttttgcacaaatgcatccagaaaaggtattaagtatttgtcatattggaggacattacaataacccttctcgtttatataatgtatttcaaaatttttgggagaagcgaggagatgaatactctaaatggctctctcaatacgcaaatactatttttccaagcggtatattaaaagcaaatccgttcgcagtcatttcaagaaatatttactaccgtttcggattacaattacattcatccataattgcccagtcattacgacatcggttagaattcgatttaaaatctaaattaaaatcacttcctcaccctatactatgggtaatgggagagcatgatcatctctataaatcttgtctatttgatttgaaatctattttgcctaacgttctatataaggaaataccgttagcgggacatgcagcgaacttatttcgtcctaactatttccatgacttatatgatcgatttttaaatggaaagttaaaataaaaactattaaacttccaatttattcaactataaaaaggcttcccaagtttccttggaaagccttttctctatacgaaaagtatataaaactactttttcttagtatgcttttgtgtaacctaataggtgcttgctccagtaagagttacttacagaactaatacgtacaccagttgcatctgtttctgcactaatgaactgaccgtttcctaagtaaacacccatgtgagaaggacctgatttataagtattttggaagtatactaaatcacctggttgtggattgctagtttttgttttagagctccagtatccagcaactgtttgacgagcgcctttatgaccagtttgatttaatacgtagtgaatgaatccactgcagtcaaaaccagcaggtgttgtaccagcagttctgtatggtgaaccatttaaagatctagcgaatccagcgattgaagatgtatctccacctgttgttggtttttgtacgtctttacctggttgttgaacgttatttgtaacattattgttatttgtaacgttgtttactccgccttttacaaacttaacgaagtctgcacttacgtaacctgtgcggccgttatggttaattttgtaccaaccattttcagcaccagtaacgtttaatactttaccatttgttactccaccgattacagcgttgtatgtagctgggcctgtacgtacttttaaagcaccagtgttaacaacataagaaccaccagtttgaactgttgtagtattgttgtttgtagttggttgttgtgtttcgttagatacagcagaaccaccttttgttacgaagtctttgcttacgtatccagttccaccattgaagttgattttaaaccaatcttgtacttcacctacaacttgtactgttttacctttgtttacagaacctaatactgtatgagatgtacttgggcctgtacgtacgttaagtgaagaaacgtttactgtgtaagtacctgttccttgttgaacagtcgttcctgttttgccaccagtcgttacgaagtcaccacttacataacctgtttgaccatttacgtttactttgaaccaaccattttcttgtccaactacttgtagcacttggcctgattttactttagaaataacgttatgtcctgtaccagcacctgaacgaacatttaatacatcagcagttactgtgtattttaattcagaagttgtttctacagtttttgtttcagttacagtcgtttgagtttgagtttgtccattaatttcttttagcgcttcatttgaaacttgtgcatgagcagaatccattcctggaactgcaacgccagctacagaagctgctgctaaacctgcaattacttttttcataagttgtctttacttcctttccctactatcctcttaaaaaaaactaaaactttaatactttacaatattatcaaagtaaaatattcatccagttccattttttagcaagagttttatttttcacacagagttcattttaaatgaacaaagtgaaatccgtgtgaacttcatgtgaactttatcattaaacacagtgtttttgcaatggttttttcaaatttcttatatatcgcatgaaaattcgacattctatttaatattttaatataaaatatcccttttctatctattataaaaaattctattaacctaatacaaactcaagtatgtatttccttataaagctccttacatgaagtatactttcatcatgacaaaaatcactctatttatcaatagtataatatttttagaaaactaaatttctatactatctacaattttgaaataatttgacgaattgtaagatttatttcacaaaagccatttctcctttaaagaaaacacacactatatcaactgttctctttttcttataatggaatttataggatatttataggatatttatagtattatatacatatcttaataaacaagaattttagcgaattaattaaagtttcattcccttataaaatgaaactttaatcaggaagggttttatacatcctccgctaattattaaccctcaccactcgggctgcccattaatgcggagttttattggaataaaaagaggaggcatatttgtgagaaatataatagatgatccaatacaaaaaaacatagagctatactatgcttttattcaattcgtttcaatgataacattacaaaaagtatcagctattgaaacacgtaaaaacgaattaaaaaatcagatgaaaaatgccggacaaaaaaacccttattacgtataaaaaaaggtgaacaggttatattcctgttcacctttttaaattatttataaattttcacacggtcctctagcggttggaattctttttcaccagcatgtactaccggtttaccaaatggcatttgtgcaataagtttccaattctctggaacatcccactcttttctcacttcttcatcaattagcggattgtaatgctgtaacgtagcaccaaacccttcaatttctaaagctgtccaaattgcaaattgtaacattcctgatgattgctgagaccaagttgggaaattatctttatataatgcaaagttagcttgaaggctttccactacttcactgtcttcaaaatataaaaccgttccataaccacttttaaatgcattcattttttcttcagtaggtgcaaagttattttcaggtacaatttttcgtaacgtttctttcgtaatatcccataatttatcatgttgttctcctaataaaacaacaacgcgagcactttgagaattaaaagctgaaggtgtatgttttacagcatgataaatcacttcttgaattttctcatcagaaactacttgctctttactaattgcataaatagatcttctgtcttcaattgctgagtaaaaatcttttgccatcataattccctccaattttcaattgaggctattttatatgtatatatcatattacgcccctcaaacttattattaataagcttataactttataatatcacagcaacaaacaaactcaaataataacacttatatttagaagctttttcctttttaaaataaaaagactgtttgttgttatctaaaattagtaacaacaaacagtcttacttatgtagcgatctagattcgtattttacttacttaattaactaatccaaatgcatacgacattaacttatttgtctctgtaaaacgttttgttttactggatgtccccatgaccactgtaataattcgattatcaccttgctttgcagtcccagtaaaacagtatcctgcactatctgtaaatccagtctttagtccgtccattccttctatatataaacttttattatttttgtttaacatgtcgtttgtgcttataacattaatattattaaatgctagctgactttggcgtaagtgagtcacttctaatatttccggataatcttttataagatgatacgccaattgtgctacatcaccagccgtcatttttgtttcacttccatctggctcttgtaatccagaagcatttgcaaatttagcatgttccgacatttttaactgtttcgcttttgcatccataagctgaacgaaatctttctccgattttgccatatgttctgctaaagccacagccgaattattagctgactcaatcattaatgcatgatataaatctttaacagttaatgtgtcattaacttgtactgggattctcgctccttctgtttgtgccgccttcgcactcatttttactggatcttcccagcgaactttcccgttatgtatactctctagtaagagatacgctgtcatcatcttagacatactagccggtgcaaaagcttcattttcattatattgataaataatatctccatcactcgcatcgataatcatagctgcttttgcgttaatttctggtgggatgtactttggcgggactacttttttagtaaatcctgctttaggtagttctgccacttgcaaaggttgtccctctacattcgctatgctcttttgatttccttggaataagaaccaacatatccctaaaataataactaataggactgtcatccttccccattttaaccgattcatttcaaaactcctttagcaaaccttttatacactcacatttaaccttaacaacaattcctttatatagtcaaggtaaaaggtatatttattcatatacagcaatgattattttaatttatttatgttaaacttacaatattgaaacgtaagaatattcaataataaaatctcgtaaataaagcgaaactttaatcagccccaccaattgggctacccgtcaaatagcgagataaactatttaatagaagggattcatacaaatgctacttccaaaatcattaaaatacggagacacagttgggatctactccccttcttcaccagtaacctacacttctccaaaaagatttgaacgagcaaaatcttacttacaacagaaagggtttcatatattagaaggttcattaacaggtcgatatgatttttatcgttctggtagtatacaagagcgtgctgaggaactaaatgtcttgataagaaatcctaatgtttcttgtattatgtcaacaattggtgggatgaattcaaattcaatattaccttatattgattatgatgcttttctaaagaaccctaaaataatgattgggtattcagatgcaactgctttattactaggaatttacgccaaaacaggaatccctacattttatggaccagctctcgtcccttcctttggcgaatttgaaccttttgttgattgcacatacaaatattttgctgaaactttactacatgatcattctcttccttatcatataaaacaaccattattttggtcagatgaatttattaattgggaagaaaagacgaaggagaaagaacttcgaccaaacgattggatttcagtaattgatggaaaagctactgggcgtattattggcgggaatttaaacacgatacaaggaattttgggtagcccctatatgccacatattcaagaaggcgacattctctttattgaggacagttcaaaagatgcagctactattgaaagaagcttttcattacttaaaattaacggtgtattcgataaaatttcaggtatcattcttggaaaacacgagcaatttgatgattgtggtaccaaccgaaaaccttttgaaatactattagaagtacttcaaaatcaaagaattccttttctagctgacttcgattgttgtcatacacatcccatgattaccatacctatcggtgttcaagtagagttggatgcaacaaataaaacgatacatattgtagaaccttggaaaaaatgaattcatagatagcttctattgttttacaataaaagccatgatactatataatttggaatgtgaaaggttaaacaaaatacgttccaatatatatcattagaaaaattaggtataaatatatatttatatgcaaaagagagtgaataaatgaaaccaactattaaaaattacgtatttttacatgtagcttttttgatatattctatcattatggtttacatgaaatgggcagctaaattccccattgcttccatctcattttttgttgcttatttcggactagttatacttttattcggatatgcaattttatggcaacaagtaattaaacatttcgaaatttcaaaagcatattcacatcgcggaattattatactgtggtcaatgctttggtcagtatttctatttggagatactattcagtggaatcatttacttggtgcagctattattatcgtcgggattgtggtggtgacaaaagatgaatagttatatgttattatttattttcgggataattttagctaattactcacaaatattattaaaaaaagctactttgcaacaatacgattctagaataaaagaatatgtgaatccttatgttattatcggctactctttatttgtaattaacgccggattaaatgttatcgccatgaagggcatggcattaaaacaagcatcagcattagaatccttaagttatatcatcatattaatttttggttggtatttcctaggagaaaaaataacgaaacgtaaactcatcggcaacatgattattatcgttggtgtaatcgtttattgtatccaatagtaaaaagctccgtttatcacaaacggagctttttactattgacctaaattttgcactttatctttcaaatctcgaacttgatctaccgtctgcataagctcagagtttttaaattgctctacatccactttgccttcttctatctttgtcttcgccgtatcaattaacgtatttaacttttcgttatatccgacgatttgttgatgaagatcctttgctacatcaggtggcgttaattcattgaatgcgggtatatcttgtttaatttcactaagcttcgtttctaattcttttcgagcctcgctatcattaacggccttttctgctaatgctggtgcatcatttgcaaatgcacttatttcatttacatagtctgtcgccttttgagcataatctatggagttctttccttcttccactattgaacatcccattaaaccaattgaaactatgaatactaatacaattgattttattttcattttagacccccttcgtccttataattgtctgtaattttctctatacataacttctagctaaattgtttatagcctttttcaaatagctatttaccctcttacatgccctattatcgttacaacatctatttctatatgcacgcttataatatcttcaattatatccatatacccttgtcctatagctgttccatagtgtaatgtaagccccttcttttcatacactgactttggcactgaaaaaataaatctcctcaaatttctttcatcagctggttccataattaaaacaatcccatcctcatcaaacatatacgctcgccctccaactttacattcactatggctcagtattgccttggtcagcaaaatttaaaacataataagttaagatacactctgctctatcataaagtgaaactttaattagccctcaccagtcgactctttatcggcaaatagcgggataaaaataaaaagcattcattcttttttgttaagaataaatgctttttaaaaaatcaatttctaactctaacatctttttttgacgaggttttactttccttacgggaactccagcgtaaatataccaatcatctaaactctcttttaccatactcatcgcgccgactgccgtaccttctcctacaattacatttggaaaaataatagaattagcaccaataatcacatgtttttttaaaataactttttctgctttcacattcctatattgattcgggacggttggccccattaatgtatttccactgaaatcatcaagtactgcatatacgattgttttagctgagatgtttgcaaaatcatgcatttcaatcccaacttcccctccatataacgctgtatacgctgatatgtgcgaataacttccaattgtgattttaccacttaaaatgcaaaaatcatcaattcttacatgattgccaactgatatagcactcggattatatatacttgcttttttactaaccaatacatttttcccaacagataaaaatccaattttctttagttcttcttgactataaaaactattcatctaccgacaccaccttctgctctaaacagattacaatttgctctactagttctttcgtcatcccttcccataaaggtaaacttacgattcgttttgctattttattcgtttttgttaaatctgtcgacttatagtttttaaaaagaacttgttggtggcaagatggtgaaaagtataatctagcttctattttctgttttttcagttcttcaattacttgtatgttgcgaacttcttctggacaaatgataggcataaattggtgaataactgcttctgtcttttggactttccacccttttttcattaacccagtattttgtaacaactgtttataccattcagaaatacgggtacgttcttttaatttttgatcccacttttttatagtcgcaatcccaatagctgctgcgtattcagacattttacaattaaaccccatcatcgtacattcacgatttttatcaaatccgaaattccccattcttttaatacgttgtatatcttcttcgtttttactatatatgagccctccttcaccaattccgaatggctttgttgcatgaaagctatatacgatcattccactaaaatcttgaccgtaatgcatccctccattcattaatccaaatcccggcgccgcatctacgacaaccggaatccccttcttctctaattcttcatattcttctaagttcatccatgatccaaaagtggcgtacgggacaacaatcgcaacctcttcttttaattcttctatcttatccaaaagtacggttttatccatataccaatcatctattgaaatatcaataaagtaaggttccaatccacaccaaatagcggctaaggcagtcgcagggaatgtaaagctaggcatgagagcatactttccctttcttcttttctttagttgaatagccgccattaaccctaacgttgcgtttgctactgttgtaacagctcccctgttttgaaaaaatgacgacataattgtttcctcaaaacgttgatttataggtccataattcgtatatatgtgagatgtatcaatttccttcaattcgtccaaatactcacttacaggtacagttgaagcacgtaaaaaaggaatattctccatatctattccttcctatcattttcggacaatatagagcatatctgtttcagataatccaaatttcctagcacttttcattccttgtttttccgctatgttatataattctaccttaaatcctgcattcattaatcgttgaataaatcccgattgattgtaaattctcacatgatcttcttgaccaaaagctaatttcctcaattgtggtgttacaattaattcattctctataataaaatctacattcattacgattggtacttgaataattccccatccatttggctttaacactctatataactctcgcattgctttgtcatcatcaggaacgtgttctaatacatggctacataatattacatcaaaagtattactatcatatgtaattcttgtaacatcaatttccttcattaatggatcctttggttctaagtcaccacatacatacgtaatatttttatactcgttaaaccaatctcttaactttgcttcaggtgcaatatgaagcattgtatagtttctatttaacaagtccgtttccgtttcaatgtacgcacggtacaatctttcacgatccatcgaattacaaactggacatatccctgtatctttattccacatttcaaatttatatttcggaaaatcataatgtgctggccaaggtgaaaatttttcaaattgttgattgcaatattgacaataacaacattctttctcgaacatatgagcaactaacttgtttaagcctttttttatcttttcattataaatttgatctagttcgccatttcttactgcatccttaactataaatcccgcattttctaaacaataagataaactctctttatactcactttcggagcttaaaaacccactattatatgcatctataattaattcaatccactcttcaattgtcattaaaataaaatgcatttgtttttgattttgtccactatgctgtctaaaataactaagaggttcatgtatataaactacttttcctttcctcatcatatctagccaagttgcaatgtcattaatagcagaataagcctttcctttaaaatatccaaacttcccgtcaaacaaattccgattaaacaaaacagttgtcggctcaccaactacatttttcaagttttttaacatataattccctaattcttttccttcaaaaagtgtagtttctttcgcgattttcatatttaatgttgaaggtagtaatatctctccattctcatcaatcagttcacgatatgacgtcacaaatgaaatattttctaacgccaaaaagtatttcatcattctctcgatcttttcatgatgaaataaatcatcatctaataaaaagtttatatagtccccattcgcaagttctacacacttattaaagttttcggcaactaacggcgtttcattttttacatatgtaatacactcatattcacgtaagtacggttgaatcatagcattgacttcattatttgtactgtcgtcagaaataataatttcaatattttcatatgtttgattcaaagcgctgttgagtgctaattccaagtaataaggtctattgtatgcaggaataagtatacttactttcggtaaagaagaattattatttatatgttgttttttcttttctatgtttattttcttcgctctaattttttggcaatagtctaatgtatataatattgatgatggaactatccttcttgcataatctagaaaattagttatcgctttatctaactctttttcagtggataagaaaccatattgttctcctgctataatactgtgtgaaaaatcttctaacccatccatcattttattagattcatttaactgttgatctggatgtaatcgaaagtaactaagtgtctctgctatatatacagcttttcctttacttaataaagataaccatgaagctatatctacgttacataaataccgcctcttatcaaaaatcccaaacggttcttgtaaatcatttttacgaaataaaactgttgtcggttctccaatataatttttttgatccacaattaccttatttcctaattctgttcccgctataatggtatcctcttcaaataaacggacagtcgaataaatatgtcgtagctctttccctttatcatcaatgacttgacgatgagatgttacaagcttaatttcattatctaaatcatcgaaaaaatacttcatcattttttcaattttattcacatgaaatacatcatcatccattaaaaaatttatatattcaccgttcgcttcattaaataacattagcgcattttcaaattgtccgagagttgatctattttttatataaataatatttgaatgatcacataagtatttttgtaacactttttctgtttcatcattcgtgctgtcatctccaactataatttctatattagggtacgtttgttctaacacactacatagcgccttttcaaagtaacgaggacgattatacgtaggaattaatacacttaccaacggaagttgctctaccacctcttcagttctttcaatacgagttctcattttaactctctcacctcttcgcatattatttatatacgcgacacaaaaatcacattactttaactgtatggagcctatatacttttatgcaaacatgaaacaaattatcatacttttcgttcctgaataaacatatttaataatgcggacattttatttgcaccttttttattcatatgatcactatcataaaaatcatcgtcacaaaataatggcgaatcaaatagatctatgatttgaaaagaatattgagtttgaaaatcatttataactttataaaaatcttcttttaattttttactactacaattgaaataatgtgaagtaacagggaacacaacaattagtggctttatatcattttttaacagtaaatctaaatattttttaaaaatcattttattttcaactaaagtatgagggtacgacaatttagcatgtgaagctgctcttattttcccgtgttcttcaaaaggaatgtgaagaggagtggtattccactcagcatttatccaaggcagtatcaatgattcatcttttagttcatctaataaaatatattcaaaatgcaaatttaaaatagaaagaagtggtttcggagtatttagatgtgagaatccatcagtgggtagaggagagtgaactacagtatgatgaccatcttgaaacaatggataatatactttgtgaattctatatgattcggaggataacgacatatcaaagtaaaacgagaaataggctattcctattaaacaatattgaaatgaatgattgtttgataaaagttgtgacgctattaaataatcatagtatagatcttgcgatggaagtgttaattttattgacttttttgagagaagctccgtacttatgccacaatgcggataagacaaaccggtagcaaacaattcatacgtcggatcactctttgcttttttcatagaaatgtataaagacataagatccggatttatttgatagatagaaattaatttatccttccattcatacatgtattttgttaaattaataatttttgaactttgcacgcccctatttatcaagtcatttgtaagtttttctgcgtcccctctccaaatgactatatattgaaaagaactttctatacgaacaacatctgaaacgtccacaacatgaactattgttttacatttatttttgtctaacgtatttcgaatcctatcccctgataattcatcacttaaaacaatgattttatattgttccttcatgtacatcccctccattatatgtataatatgaaattcatttttaattcgtaacaatcatatacacctgcaatctaacaaaaaaaatagctccaccattaggcgtagctatttttacaattattgcttattcaaattatattcctttatctaactcataaagtttacgatacttttcattttctttcagaagttgtttatgactaccttgcatgacaatttggccacgatcaaggaatataacttcgtctacatgttctattcctacaagatggtgcgtaatccaaataaccgtcttttcttccgttgcagaaaacattgtttcaattaaagacaattctgtttttggatctaaaccgatagtcggttcatcaagtacaataattggtgtttcttgcataagagttctagcaaaagcaaccctttgtctttccccaccagaaaaccgctttcccatttcatgcatttttgtttgtaatccgtctggaagagaagtaacatgtgaagctaattgtgctttctctaaagctttccatatctcttcatccgtcgcctctggtttgccaattcgtacattatttccaattgtcgtatcaaacaaatgcggcttttgatttaatacagaaatatatttagataaaagattcgtatgagctcgttcaccatttagtacaacttggccatttactgggcttaacgcccctgttaacaattttagtaaagtagatttccctgtcccacttctccctaaaatagcaattttcttccctgtttttatttgtaatgatacatcttttaatacaatctcattactatctggataactatacgatacgtgattcagttcaatatctacatgttttggttcaatataatctttctctccatgcaaatccgtttcatcatgtaaaacactatcactttctacgccattaagacgatgggtagattctacatacgacggtattcgatcgatggcatctgcaataggaataagcgcgttcgttacagataaagtcattaatacgaaagctgcgataactgtaggagcaatttgttcacttgccgcttcattcccagtccatatgatcatcgaaataactacaatacctactactaattgaatgatactgtcccgaatatgataccagcgtttcactctcttttcgatttttaacaactgatcattttgttttacatactcattaataaattcatctttacgaccacttgcttgccaatcagataatccaaaaacagcatctgtcagttgttgatacaaacggtttcttccttgctttaaagtaacatgatgtttcttcatcaaaagtaatgatacaaacggaagaagaaaaacgataatagctaacatacaacctacaataagtgcaaaaacaaaatcaaatgcaccgataacaagtacgaagatactataaacaactagcgctaatatgctaggaaatattgtacgtaaatataggttttgcaaatgctctatatcttcggataacactcctaacatatcacccgtttgaaatcgagaacggaaaaataacgcctgtggttctactattctatatagcctcgttctcattttttctaatatacgtagtacgacatcatgtccgactaagcgctctatataatgaaatacagcttgccctatactaaacgctcttgttgcaacaataggaacatatacagccattacattttctggtctaagggcagattttgagattaaataacctgaaataaaaagtaacatcgctcctgaactaactccaagaagaccaaggaaaatagttaaagtcattctacctttattttgttttatataaggtttaacccagttactcatttctctcccctctcttccctatgaaaatgtaatgtctcattctctaaaagttcttcatacgtcccactttctttcatttcccctttatttaaaataagaatatggtccatttgtttcatccaatgtagacggtgggttgctaaaaatactaactttccattaaatagacgtaacatcgcttgctttatttcaaattcggtttcaatatcaagatgtgccgtaggctcatctaataaaatgattggttttttacttaaaagcgcacgcgccatagcaacacgctgttcttgtccgccacttagcatacgtccaccttctccaattctttcgtgcatcccatttggaagtgatgtaacgagtgaacgaaggccgacttcattaataactctttcaacttcttcatctgttgcatttgtttcataaaaacgaatgttatcctttaatgaaagcggaaaaatataaggttgctgcggaatataagcgatatttttttgccaatcttcacgagtagatccatcaacttctacaccatttactaacatctttccactcgaaggagataaaaaacctgctaatacgtcgattaacgtcgatttgcctgcaccactttcaccaataacaccaatagcaccgttaccttcccaagtaaaattaattccttctaatatagccttttcagattcagtattattaactttgatgtcttgtaatttcaagctactagaggcattccatactatatcttcatttaaatctttcttttgtattcctttttgttgttgcaaaatctcttctatttgctccatcgcaatttgtccatctaatgtcgcatgataatttgctcccacttgtttaatcggcagaaaatattccggagctaaaatcaaaattgtaagggctggtaatagtataatcgttccatctattaaacgtatccctaatccaactgccacaaacgcaattgataaactcgtaaagaaatctaatgcaaaagaagaaagaaaagcaactcgcaaagtacgcatcgttgcttttctataccttttacttactttttcaatctttccttcgtgctgttcacttttccctaaatactttaatgtttctaaaccttttaacgtatctacaaaatggttcgaaagtacacgatatatctcgtactgactatctgccattttttgcgctgccaatccgagaagaatcataaatatgatcacgataggaatcgttacaactaaaatgattccagactcaatatctagcgtaaaaacgtatagtacaattagacctggaacgatgctacttctaatcattttaggaatcgttaattcaatatatgttttaaatttctcaatcccttcaattgataaggtaaccagatgaccagttccaacagtttgaacataccttggacctaatgtgaaatatgcctctattagttgttttcttagtaacgaccctgttttttcagcaaaacgttccactaatatttgtgatgttcgaactactatgtgacgcgctgcaaacgcgataccaaaataaacaatttcacttaatattgtttgtactgtctctccatgaaataaaaacgtaatagctcgtgctaaaaagattgtttgcgcaataatactaaaagcttctaaaatactaataatcgttaacgctacatataaaatacggctaccgggataagacggaagtcctctttttcttttcattagtactccaaatcgttgtctgacttaacaggttgtctaaatacataataactccatatttgacttccgataacgaaaggcaaaatagcaatcgcaaagtaagtcataagttttaatgcataagctcctgatgctgcgttgtaaattgtcaaatcattcattgctcctaaagagctaatcataacacgtgggaacataccgataaatacactcgcacttagtaaaatgattgttaaactcgtcataaagaaagcccaaccatctcttcttcttttatttaataaagtggacactaatagtgctacaaaagctccgattggcaccataatccattctgttccatgagcagtgaaaatgtcggttttccataaccccacaccagcaaaaacaagaagtgtaattaatgaaattggtgcaatttttattgcagcaattcgtgcacgttctctcaatttaccagttgtacgtatcgtaagaaattgtaatccgtgaacaatacatagtaggagaaacattactcctccaagtaacgcaaatggatgaagtaattgcaagaatccacctacaacatttttactctcatcaataggtacacctaccataaagtttgcaatcgcaactccccaaaggataggaggtaacatacttccaataaacatcccccaatcccatgcactcttccatttatgattatctattttcgcacgaaatttaaaggaaacacctcttaaaattaaagcaagaagcataaatacaaatggaatataaaaaccactaaataaagttgcataccagtgcggaaatgccgcaaacatggctccaccagcacaaacaagccatacttcattcgcgtgccagaacggtcctattgtatttaagtaaactcgtttttcaaaatcattctttcctaaaaacctcgaaaccattcctaccccaaagtcgaaaccttccagtacgaagaatccaacaaacaagattgcaataactaaaaaccataactcattaagagataacatactcttcctccttatcaaatggatcatggctttgataatcctttttcgttttcttattcttgtggcccttaatggtacgaacaaataagtacacacaaattccacccataattaaatacattgatgtgaatgaaataagtgagaataatacttcaccgaatgttacatttggtgatacagcatcttctgttttcattacaccaaatacaacccaaggttgacgacccatttcagtcataatccaccctactgtattaccgatgaatggaagagaaattgcatacaccattaattttaaataccacgttttttccgctaaacgatcttttcttgataagaaccatccgtaagctcctagaagaagcatgaatgttccactcattaccatcgctctaaaactccaaaacattgtatgcactggaggaatataatctccaggtccatatttttcctcatattgtttttgaatttgattcatcccttcaacttgaccgctaaacttatcatacgataatagacttagcatataagggatttgaatttcaaacgaattttctttcttctctgtatcaattttcgaaaatactgtaaatggtgctggatcctcacttgtattccatagcgcttcagctgccgccatcttcattggatgtgtcttaattaattgttgcgcttgtgcatgaccgaagaataatacaagcgccgttgtaattgttccaacaatgatagaaattcggaaagattttttaaatactacagtttcttgtccttttgtaattttccatgcacttacaccagcaataaagaatgcacctgttgcaattgccgctgtaattgtatgcgggaattgtacccatagttgtgggttttgaataatggctaagaaatcattcatttgcgcacgaccatcagctgccatttcatacccgacaggtgactgcataaatgcacttgcagttaaaatccagaatgctgataacatcgttccaattgaaaggagccaaatacacattaagtgaattcgcttcggtaatttatcctcaccgaatacccataaacccaggaatgtagactcaatgaaaaatgccagtaatccttcaatcgcaagtgatggaccaaatacatcacctacaaaacgtgaatacgttgaccagttcataccaaactgaaattcttgtaaaatacctgttactacacctactgcaaagttaataaggaataattgcgtccaaaactttgccatcttcttatatacttcttgcccttttaccacatacaacgtttgcatgatcgcaataataaaagctaaaccaattgacagcggaacaaaaaagtaatggaaaatcgttgttgatgcgaactgtattcgtgccaattcgagcgtttccatactaaaatcacttccttcatagtttttataataaaagttaattgagcaatcttatcaaactcaattattaagaaatacgaaaagacaaaaacattttgtatgtattgtcgaaaaatatgaagtttcagtttttcaaactattgtaatgctattttttaccttttcactatttctgtagtgttttattcgttaatcgaattgtataatatacctgcatagtaaattcaggttatttttgacgtattattgacatcattttgtctgaaatatgtcttttgtcatttttttgaatcagatttttctcattagcaaaatgtgttttttcaatatacttcttacttttatatctataaaacaatcgtttttctcttcatacacttgactttcacccgaaaaaatgtcctcggaactaccctcgataaacgcttgttttttgtcaagagaaaaatgtatttttaaaattcaaactcgaaataatgttattcaaaaatagaaaataacttccctcttcctcgactaaaagttcatttttttgtcatttttccagaacaaataaaaaaaactgaaagtcgattagactctcagtttttttatttattttgctgtatgttttctaacggctggtaaaatttcagtagcaattaattcaatatttttctcaattttatcaaatggtacaccgccaaaatcaatttgtgccataaagcgttgttggccaaataattcatattggtacagcattttctcaatgatttgttgtgggctaccaaccattaaagcatcacggtaatctattgcatttgtaaattgctgtttcggatacccaccaccgcgcagtgtaagcataccagcattaatgtgagggtaatattcactaagtgcatcttgtgaattttttgccgtataaaataaactcgttgtcgcaactggtaaactagctgaatcaaatccactttgtacagccgcctcgcggtaagcatctactgacactttaaagttaattgctggaccaccaagtgttgttatcatcattggtacacccgcgcgtcctgctttaattgcactagctggtggacctccaaccgcacgccaaattggtaagttattatttttcgctctcggaataaccgatgcatgtgcgagcggtgctctgaactgtccattccatgtgacatgttcctcgttattaatttttaataaaagatccatcttctcttcgaataattcttcataatcattcacgttataaccaagtaaactatatcccccaatacgagatccacgaccagccacaatttctgcacgtccattagaaatcaagtcaattgtagcgaaatcctcatatactcgaactgggtcagatgtacttaatatcgttgctgaacttgcaatttttatatttttcgtagcttgtgcaatagctcctaaaataactgtatgagcttgtgttgtaaaatgcgtttgatgactttcaccgacagcaaacacatcaagccctgcctcatctgctaacttagctgtttcaattagttcgtgaattcttttctctggcgtaattttctccccattatgtggatttaaaacatgatcaccaattgaatataatccaaactcaattccttttcttatatctatacggtatttttccatagttactctcccctttaataaagtagtattagtttttttctaaaaacgttggtaagtcaggtatatctccgtattacctacgccttcacttgattagtcaattgatagtgtaaaaaaaattactcttgcggtaattcttttttttcactatgcttatgaactttcgtcattagctcgtataatattttctgctcttcttcatttaatacatcatcaaaaaacgaagattgaaatgcaagttgctctggcaatgctttctctaaggccgattccccttgctctgtaagactaattgttttcgttttccaatcttgttttcgtacaatatatccttctttctcaagacgagttaacattcgagaaataccaccttgtgtaacagttaccttttcagctaactccatttgtgttagtggctgatacgtacgtatttgcaaaagcacatcaaattgagctgtcgttaaatcaaaacgttttaaaaactcatttgacatttgattactttggttcgtaaatcgtattaaacgtaaccatattaatgatcctatcgtattatcacgcatgttttgtcacttcctagcgttcatcttactatcactttactacgcaagtgataaaaaagcaagaaaaaatgtaataaatatatcgatagagtattgcataaataatgataagtaagaattcatataaacatgaattcttacttatcattattcttaactttgcctttcattcattactatatttaaagctgccatagcttttggccaaccaacgtaaaaagccatatgtgttattaatgcaaccaattcattctccataaccccattttgtttagctagcttcagatgaaattgtaattgttctgtattaccgagactgattagtgctgacacagtacacaagcttctttctcttaatgttaaagtggcatcccgccacacttcctcaaataatatcttttcactataatgagcaaatgcaggtgacatttctctcattttctttttaatatgtacttcaataagttcatttttttctccctttattttcaccatttgtgctattccttgaccaaatgaccagttttcagcagctgtctcatttaatgtaataaaaatatccgaagttttaacatcggaatattccgtaatttttaaggataccgattgatacaaatcttttttctgttgcactgttcttcccggtccacatgtaatagaaacataaatcatattctctgttctcttttctcctctttccaacaaataatatggattatataaaaatttgttttcttggtaaggtaagaacatttgaaaataatcattttcagggatgttaaaatgttcaattaatgaaagatggatacattcacccattttttccaactcttcttcatttaatatgttttcaggataataaatcttcacaaaaggcatagactttcattccttttcttatttttaatatgcaacaaaatttcatcgtgaaatgtgtaaaatctcatatactgtaacacctttattcactgcaatttcaggcttctcctcataaaaattaaacctactatacccccatttatccggattataaacgattacattccctaaacacttttcgttgttttgtacatcttcattcatagtgcttaattgagtcccaatcagtgttttactttgagaaatacttcctgcatattcaacaacatatctacttttcttaaatccatcacttagattaaccactaatggaacacctatatgtatttgttgccatccaaaagattgtaaaatgttatcgtaatacccttcaaagataaatttattcatcccttcatgaccattccaaatatataaaggtgcatagcagttataaaaattcccgtctttctccgtttccgtaattaaataagctttaaaatttagtgcttggaaaccatcagttttataaccattatcctttacccttttcctaataatttccatgtcataatcctttggcaaaatgaccttatattgcattccaatcatgtttatcactcgctttcaatcttatatacattatgataaatcgataagtagctaacgtaaaataggtataaattatgtttggtatcatttataatgatagtgcataaggggctgagatatatggaaataaatgatcttattatattcaaaactgtagccagtgagggttctattagtaaagctgctaaagagttaggttatgttcaaccgaacgtaactgagcgaatcaaaaaattagaacaagaattagaaacgcctttactacatagagataacaaaggcgtttccttattaccttctggtgacattttattagattacacgaataaaatattaactctattagaagaagtaaaagatgaaattaaaacgagtggttcttcttatataatagcgacgtcacaatctattttgacaaattatttaagtaagcgtattgaagaaaacttcagaaattatcaaatatatgtagaaagtagtagtcatttgcaaaaattacttcagcaacaaaaagttgatatggtcataacttatgaggattatcctgacgcatcgtttaaaaaagtgttcacaacctcaatttctgtaggcttattaaaagcgaaagaaaaatgtaccattgattattcaaaagaaattttcttcgttagcaatgacaaaaagtgcccttttaggaataagacgatacaatttctaaaagaaaataatttatctcagcgtcaacttcaacaattagattcttattcgcttatggaagagtttattcaggacggaaaagggatagcctttttgccgattaaaaatgataaattggtaccaattgaagatgttccagttgagaaattagctgttcatttttttgcaaatcaaaactctttcaaacaaatccctgatgaactatttggttaataaaaaaatccctcctttatgaatctaaaagagggattttcatattctatacaattgatttttcacacattttgctccacttctgcacttttctccttcttattccgtttcatattcttcagtcccttaaccgtcccaaccaatcctttcggaaaaacgagtagcacgataatatacaataaacctagaataatcgtccatctttcaaaaatcggatattccgtcgctagttctgataaataatattttagggattcaataatcccagatccagcaatagctccaattaatgttccgactcctccaatcattgtcatcaagagtgcatttagtgtcatttcaattgaaaatacagtcgtattgacaaagcgtaatgtaataacaaataaaccaccgctaattgcagctactattcctgccactacacttgcgattattttataatggaggactttatatccaagtgcttcaacacgttgttcattttgtgaaattgcctttaatactttcccaatagaagactttgtaaaaagacgtaatagaataaaaatgaagcataaacatacaagtgatacataataaaaagtaaaacgatcacggaatatttctggtaccccaaatgtaaaaccatctcctccgtgagtgagcccacgccatttttcagcaaggacgaaaaacaactgtgaaatagcaagtgttaacattgcataaaaatgacttttcaatcgtaaagaaagcaaaccaattatataactaacgattgctgaaacgataattgcagctactattccaattaaaaagttcgttattgatacgccttgtcgatcaaataaaagcgctaccccatatgctcctatcccaaagaacatacaatgaccgaacgatacaattcctgtatacccaagcaatacatcaaaactcattgcaaaaatagcaaagatgaagatttgagtgaacaaaattaacaggctccgtgaatcatttacgaacggaaatacacttaaacaaatgagcatacatactccgaagtatactttaattcggtccgatgtgttgttcaccatttcaccccttttcaccaacaagtccagttggcttcactattaagaaaaatagtaacattaacatattaattgcaagtgataaatctggtataaaatacgctgtaaaagcaccagctaatccgacaattaaagaagcaatagctgaaccttgtacgcttcctaatccaccgataattactactataaaagctaaaattgcatactgcatgcccatctcggcgaaaataacgcctgaatacggtgctaataagaatcctcccaaagctgccatccctgctcctaataaaaagacgaaagaaaatatcgcttttacattaataccaagcgcttgaaccatttctttatccattacacctgcacggatcataagacctatcttcgtctttttgagtaatagtagtagtgcgatgtaaataattatcccaatcaaaataacaaatagacgatatttaattaatataatacctccgaatgtaaaacttccttgtaaccataacggtaattttgcactaatagggtttggcccccaaaatattttaatacactcactaagaacgagcattcctccaagcgtaacgagcagctgtcgaacatgatttccatataccggtctaataagaaacctttctaaaataaatcctaggaacattcccatggctactgctccaactaaagctaatatataacttcctgtcatattaaataaccaaacacctgtaaatgctccccatgcaaataaaccaccgtgtgcaaagtttaaaacgctcattagaccgaaaataagtgaaagacctgatgctaacaaaaaaatgagcatccctgttgaaatcccatttacaaataaattgattaacacatccatccttttcacctcggattcatgttaagagattcctaaatatttatgacacatttccttatccttttttaattcattcataaaaccgttatgaacaattcgtccgttatccataatgtaaaaataatcaccaatttgactagccatcataaaattttgctcaacaagtaaaactgttgttttctctttcatcttcaaaatagctaccattaatttctccaccattatcggggatagccctttgctcggctcatcaataagtaataatccatcactattaataaacgctcttgaaatagccaacatttgcttttgccctccgctcaagagcccacttttcttattccaaaactgctttaaatccggaaatagttccagcatccactctattttcccttctacttccacaccttttcccctagcaagagcgaatgtttcttctactgtcaaatcatgaaaaataccttgattttctggtacataccctattcctttccttgaaattaaatgtgtaggtaatccacttacttttgcactatcataataaatttcaccatctgcaatgcggtgaaaccccataactgaacgtaatgtcgttgttttccctgccccgtttctaccaaacagtacagtaattgtccctttctcaacagcaagagatactccttgcaaaatatgaaactgatctaaatacgtttctatattattcacttgtaatagtgccactatataatccccctaaataagcactttgtacacgctcatctttcataatttcttctggcaatccttcagccaataactctccatgaaataaaacgataagatgatctgacaaacctagtatcatatccattttgtgttcgataagtacaattgtgctctctggatgtttcttaatattttcaatcacttgtaatatagcagggacctcctcaaccgaaatacctgccgtcggctcatcaagtaataacacatccgtttttaaagccaataacatcgcaagttctagctttcttttctctccatgtgccaaatctttcgctaatacgttctctttctcgtgaagtaatactgtttttaagaaacgtctcgcctctccaacttgttgctttaattttgctgaactcgggaaaaaactatagtaatcttgtacgaatgattgaacacttaaacggacattttcaagtaccgttaattctgggaatatgtttgtaagctgaaaagagcgaccgattcctaagcgtgttcgatctgaaatcgatagttttgtaatatcttgccctttaaaatacacttcacctgttgtaggtgaaatctgtccacttagtaaattaaataatgttgtcttccccgcaccatttggcccgataatagaaatgagctttcctttttggacagttaaatttacatctttaataacttgatgttcaccaaaagatacactaagatttttcgtctctagcaaatgtgtcacgaaatccctccctttaaagccgtgagtatgaaggaaatatgtataaagagggtcccccctctttatacaaaaacaacagaaaattcagtctatttattttgaactggtggttctgtttctttcatcgttaattctcgctctaacactggcaccggataatcaacaccatcttgctttttcaatgtgatagaatacagcgtctgcatcgcttggtggtccttctctctaaacttcatctttcctttcggtgtatcaaattccattccttccattttcttaatcaaggtatctacatctgtatcaccttttgttttctttaaggcttctacaatagaaattgctgctgacattcctcccgctgtaaacaaatctggcactacaccattaaaacgttttttatgctcttcaactagccaatcattcactttattttttggaagtgtgtgataatatacagaaaaaccttgcatacctactaatgcatccattgtttttaatgctggtatatctggcgcacctgtagaaattttaataccttgcgcttccacattcatatctttcaactgtttccaaggtgaatttgcccctgcccaaacaataaataaataatctggttttgaactaatgatattttgaatattcgctgtaaaatctgttgaatttgtatccgcgtattgctcattcacaatgctcgcacctaattttttcgcacccgctttaaatgcagcaatcccttcacgaccaaaagcgttatctggggcaaatgtcgcaatctttacaccttttttcgcaattgccgctgctcctgcaatcgcatcttgtgaggaacttcttccagttctaaaaatatatttattccagttcttcccggtaatactatccgcaactgccggttctacaaccataatcttttcatattccccggccagtggtaaaaccgctaacgtatcacttgaactagacgatccaactaaaaaatcaactttctcttcttctaataacttcgtagcttttttaactgctacatcagctttcgtttctgtatcttctacaacaaacttaatctttttcccatctactttcccagttccaccagttgcatagtctaaccctaattcaaatccgttcactgtttgttttccatacgattctagcggtcctgttaaagaagcaagaactcctaccttaatcgttttttcatcctctgtacttgttttctttcctgaacaagctgccgttattaataacgaacctaaaacacaaccagtaaacattgtctttagccacttacgttttttcatcgacattgtgatcctccccatactttactttctgatagaatcaaacacgccaaaatcccctgtccgtaatcatgactaactaattcgatagataatggaaaactcttgtagtaccctctacattcggcacaaatatataatcaccttcctatgtaatggaaacggacatacaatcaatatatattctgtaatccaattgaaaatactgtttcatttcagtaatgatcatacaaaaagactaacttattttttaagttagtcttttcaccttaattagagttaagttctactttctctaacccttcagccaattgtttcttatctagtccttctcctattactactaagtttgtcgggaaaccgaagtcttgttctaataaagttggtactccgaacgaatattggaataggtgagggtatttatctccacggaatttcacaaaacctttcactcgataaatactatctggtaaattcgaaagccattcatataatttgtcttgatcaatcggtttcgtaaattgatatgtcatcgtttgtatatgtaaatgctgtttgacatgtagtgtctcatgttcctcatcatttggaaattctgcttcctctatatcttttaaagatatattgcaatactttgtctcatacattttcgcatgatcatttattgcctttacttcttcaaatactgtgttcttatcttcatctgttagtaaatctgctttattaacaagaatgtgactaccaaatttaagttgctcatgcaatagctgttgtacatttgcacttaatatacttcggtttaaccaccttactgcatctaaaacgactacaattgatttcacttccagaaaaggagctaaaattggcgagacacacgcgtctaacacttcaattggatgcgcaacacctgtcgtttctatataaattacatctggtctttcttgttggtataacgaatgtaattgtatttcaagctcttcttttaatgtacaacaaatacatcctttaagaagttctcttaaaacattctcttttccaataatatctgtatctaccgagtattcaccaatttcattcattaatactgcaacttttctattcttctttttctctgctaacaataaattttgtaataatgttgattttccactacctaaaaaaccacctaatatatgaatctccactttattcattcaaccgaccatccatttctttacttcaaatgtattcaaagcgtaataattacgatttatatttatcattttattaaaagaatgaacatttgtaaatataagagattcactgttcatttacttcatatgcaactctaactccagactcaattgccccttgcatccatccatgtgttaatgtcgtatgctctcctgcaaaatgtacttttccagatggtggtgtaatatacggaaataactcgagctcttggcctggttcgaaagctgtaaatgcaccgcaagaatacggatttttactccagctaaaagatgttccagtgacaaactcactatagacgatgtcaccgtatatttccgctaaattttttaatgcgtaacgaatacgatctctttgcgggagactatcccatgttaacgcctcatctgcccacgtataacttgctataacgatagctggtcctggagtatgaatgccataactcggatagtatgtaaaccgtatcggtaaatcagtaatagatttacctccacactgtcccgctttctcccaaaatctacttttaaactctattgcaattttagttgcagcaatataatttaattcacgaattgctctttttttaaaataagagaataaatagtatggctgaacttctacaaatcttaacgctgaaaatggaattgtaataatagcaaaatcacttgttattgtaaattgctctaacgtttgttcatgatttccttgtaacattactttattatcttcttgtataattttatcaaccttatactgcattaaaatatgttcccttaattgtggtaagaatgcattcgataacttatccattccaccagttatttcataatatttcgttgttgaagtaaagaaaatcatttcacgtaatacttcaattaaggacattcccatataagcttccatatcaagaagtaccccaatcatatctattgcaccatctgaataatactccattaaaaatgaaccaagcgaatacgttttatactttttttcaacgataagccagtttttatcaggatccttcttaatataatttagtattggttctaatacctcaatcattagctcttctgccgtttttcctctttctttatccaaaaccggatattcaagtacacttggatcattttcaaacacattcaatctcgtttgaatgttattcgtataaatgatatctgcaaaagttttatttataaaaaggtttaaaggtagtttaaatttatgaatatacgctaaggttaacttatgggtgtcagggattctcatcggtcccgcattaaaatataaacccacactaaatggttcccgaatcgtatacactctgccacctattctgttatttgcttctataatcgttacttcgtgcccagcctcttttaataaagaacctgcaactaatccagaaatccctgcacctgcaatcgtaatccgttttgggttattctttttaacaagccctgcatgaataatatgaagcatttcttccattgttaatgggttccccataccatttccccttttacaaaggattttactgaattatattcggttcactgaattcctatgttttgttcgcagatttgcacggatacattttcaaatacttgaatatcttttataaaatgtaataaactagatatgactctatagaagtaagacgtattatcttacataacaaaaccaatgaaattgcgaggaattttgaaatgaaaaaaggtattaaccgtgttgtattagtaggaacaggagcagttggatgtagttatgcttactgcatgattaaccaagccgtagctgaagaatttgttttagtcgatgtaaatgaagcaaaagctgaaggggaagcaatggatttaagtcatgctgttccattcgccccagctccaactagagtatggaaaggcagctacgaagattgtaaagatgctgaccttgtagttattacagctggattaccacaaaagccaggcgaaacacgtttagatttagttgagaaaaacgccaaaatctttaaacaaatcgttcgcagtattatggatagcggatttgatggcatcttcttaatcgcaacaaaccctgtagatattttaacttatgtaacttggaaagaatctggtttaccgaaagaacgtgtaatcggttctggtacaacgcttgattctgctcgtttccgctatatgttaggtgagtacttcgatattggtccacacaacattcacgcttatattatcggagaacacggcgatactgaacttccagtttggagccatgtttccgttggtatccaaaaactacaaacactgcttgaaaaagacaacacgtataatcaagaagatttagacaaaattttcataaacgtccgtgatgcagcttaccatattattgagcgtaaaggcgcaacttattatggtatcggtatgtcacttctacgtgttacaaaagcaattttaaacgacgaaaatagtgtattaactgtatcagcttacttagaaggtcaatacggtcaaaaagatgtttatatcggggtacctgctgttttaaatcgcggcggtgttcgtgaaattttagaggttgaattaagtgaagatgaagaattaaaattcgaccactctgttcaagtattgaaagaaacaatggctccggttctttaattaagataaaaagcaatccaatttattttggattgctttttattttcattatctcctatgactttttagtgattttctatcatttcttattttttagtcgcatcctcattatttatatcaagtacatctaataaaaagataaagattggtatcccgataataagcccccatattccgaggaaatgctctgagaagataagaatcataaatgtgtagaatattggtaaatttgtttttgcagacataaacttcggatttaaaaaataactttcaagagcatggattactgttatgaatacgagtatgtatactacgtacataactccgcctacgttgtaagcaatgatacaaagtggaaacaaagaaataatcacacctgcaacaggaatcaaccctagtaagaaaatcataacagctaatacaagtagctgtggaaatcctaaaacgattaatgcaatgacagtaagaatacaatttacaacggcaattaaaaactgagcctcaattacttttccgaacgatcttgcaaatctttcaccaaaatatgcaatttcctcataaaagatttttaacttactatctttaaacttagatgtaaatgtaataatacgctctttttctaataagaaaaataagcttaaaattagagataataatatttgtaaacttaccttccctatatttgctattgattgatagatgacatctacaccttgttctatatattttgatacttccatcccattaattgtcgaaagtgcatatttaacgatttcattatcaggtggattttgaaaaaatagtttaaactgataaattaattgtgaaatttgtatcgtcagcacaggtaaatatttatataacgttgtgcctataaaggaaaccaatattatatataaacatgcaataacaattttccggtttactttcaattttcttgaaataaaacgttgaaatcgatccattaaaaacgtcagtataaacgtaattaatattaaattaatcatactttttaatgcgtataatacaagcgctactattattaaaacgagaaaccgttgaaaccctctacttcgaaaaaaactctttacttcattcattaagaattaacctcccccttcaatggatggaaattgaatatattacattttatgaactcctatagacaatctttcttactaattgggaagaatccttttttcttttttattgtcggattttttcatctaatacttttctaaaaactactttatcaattctatctttatctttcgttttttctgtcatagtatctttttcgtcataacctaccattacgattacaggaatactatataagttcgatttcttatttaacgctctctctttgtctaactttcgcgccacttccatcgcattaggattaatctctgtaacagcatttaatgctattccattttttcatgttgttctctccaatctacaagttgctcactagtaaattttcagattgaaaaaagagagttatcttcttaactctctctagacaaaatgctaaatgatacaattaattattccaatcaaatcattgctttttttccattcgcttcgctaacaattccttcacttggttataggttaaccctgaatttttatttaaacgctttacttcctcaacatcagtacctaccactgtatattttttctcatcattcatttttctaattcccttctcaccgtattatttcttatatttcttccctaaatacgcataaattaacaccactacaaaaaaggaagctgtttttaagcacagcttccttctcgttacatattgtatttcttaataaaatttcactacatcttcagtaggtaagaacgttctttctgctggttgttcgtttggttcaccaaatggcatttgacctactaagctccactctgccggaatgttccaagtttctttcacttcagcatctacgattgggttgtaatgttgtaatgacgctccaattccttcagaagataatagcatccacacagtatgttgtaacatcgcatttccttgatgagaccagaatgggaactgatctttatataatggggcattttcttgcattttttctacagttgcttgatcttcaaagaatagaactgttcctacacctgcatggaagccttttagtctttctacagtcgcttcaaagttttctgctggtacgcgggctcttagtgtttctttaacgatatcccaaaacttttcatgctctccatccattaatacaaccatacgaccactttgcatattgaaagatgttggtgcgtgtaaagctgtttttaacacttcttcaattctttctttcgtaattgcatcgttttttgctactttacgaattgaacggcggttcacgattgcttcttttaagtttgttgtagttgctgacattttaattcctccaaatgtttgttttataatttattttgttatttcataacaagcgaattagcaatatccatcggtattacattgcataccttcaaatgaatttgttttatccttttcaatttctttatcaatgaccctttctagtgtttctttactagcaagcccttgaatgacttcatctccaatcatgacagttggaacagccataatattcgcttcatcatatgcgtgttgaattgcttcttgatgcttttctttatatttacgagttactaaagcatctttaaattccgcctcaggaagtcctacttctaccgctaattttgttaacacatcaatatcttcaatgttttgctcttcttggaaaaatgctgtgaatacgcggtgatgatactcattacctagtccacgttctttcgcaaattgacatccttcgaaagctaaatgtgtatatggatgcggtgaaacacgtggcaagcgcatatcaattcctaacttcttcgctgtcggaagaatgaaagcatcccatgaacctaatttttctggttcattccatggatctatttttgaatatggacttggacgtaattcaaatggcatccattcaatctctacatctttctctttcgctacctcatctaatggaccttttgctaaaaaacaaaacggacatataaaatctgagtatactttcatttttacagtcataacttttacaccttacctttattgttgtaatcaaatcggttacattaatgacaaaaaaatataaatatgatttaagcattcattttttcttgcaaagtttcaaacaactgccccattgtaatatttctcaaaacttcttccatcgcggattgtgcttgaattaaaataatttctaacaccgcttgaatattcgcaccaattggacaatctggattcggtttctcgtgaatatgaaatagcttgtcttcttcgactacgttcactgcatgatacacatctaacaatgtgatttcatataaatcctttagtaatcccgcgccaccgggtccacgatttacgtaaacaaagccagcttgtttcaagtacgacatgattttacgaatgactactggatttgtattaacactctcagccatatagtctgaagtacaaagtgaagatggattgtttttcaaaatagataaaatatgaacagctatggaaaagcggctactaattttcatcgtaatcaccacctcgatgtaatcattatagttacaactaaaaaataagtcaatccttttcatagattttttataagtaaattaaaaagtgtcccattatgatatatgagacacctctttttattctgcaaatagcgattgaaattcttcaataaatagctgcacagcgattgaagaatcctttaatgaaggaacagctaaagcaatttctctccatacttgtggttccaattctctcgtttgcacattttttggtaaattcgttaaagataattcagctaatattgcaatgcccaatccttcttgaatcatatttaaagctgtagtaactgtcgaaattacatattcagcccgaagtggtacgtttgcttgtttaaacatatcaataatgggtggttcgtatccacccttacataatatgatcggttcattctctaaatcacaaattgtaagagcgtccttcttacagagaggatgatcctctcttaagatagcaaccattttccccttcgttaatggaacaatctccatatctttattaggcaaaataacaatccctatatcaataaccctcgatactaaccaatcttcaacttctttaatcgtcccttcacaaagaactacttctaagttcggatacttttccttaaaaaggtttatcattttgggtaagaaatgtgcagaagcgctcggaaaactcccaattcgaatcgtcccaacttcgtgtcctttctccatcgcaacttcttgttcaatcttcgctacaccgttcaaaatctctctaatatgtacaagaatcctatttcctacatccgtaacgagtagcccttttcgtttatcacgtataagaatcgtaactcctaactctgactcaatacttgaaatcgcatgactaacagctggctgcgtcatatttaacaccctggcagccttcgtaaaactacctaaatcaacagtttttattaatacttgcagttgtgtaatggtcataactaatcacttatactcctcataaaaaagattcattttatttattacagtcgatatcatatcatagtgaaatgaataacaacaaggaggtctttcagtgacacagctttctcgaactaagacggccatcatccttacctttctcgttttcatgtggggaatcaattggcctttatcaaagtttgccctgcattatacaccacctgttttatttgcaggcgttcgaactttaattggaggattcattttacttctgttcgcattaccgaaatacaaagagttacatttaaaaaaaacgtggcatttatacgttatttcttccttacttaacatcattatattttacggattacaaactgtcggccttcaatatatgcctgctgggttattttccgccattgtatttctacaaccagttttactcggtattttctcgtggatatggcttgaagaatcaatgtacggcttgaaaattttcgggcttgttctcggatttattggtgtaggcgttattagctcaagcagtttaacaggacatatttctgttattggaatccttctcgcgttaggatgcgctattggctgggcacttggcacagtattcattaagaagactggtcaccgtgttaatgccatttggatggtaacacttcagcttattattggtggtctttgcttaattggatttggttcagagtttgaaagctggtctagtatcgcttggagtatgccatttgttagcgtacttctctttatttcattctttgttattgcaatggggtggcttgcatacttcacacttgttggagctggtgaagcaagtaaagttggggcttatacattcctcattccactaatagctattattgtaagttcaattttcttacatgaggctattaccattagcttattcatcggactattatttattgttgtgagtatttgttttgtaaatataaaaccgaaaacacttgctgtaaggcagcaagttgaattgaaataaacgtaagaaagagcctactgttgtaggctctttcttacgtcttactttttacgacgtactacaaaaacacacgcacttaccgacgatactatggcaaaaatagataagacaattgctatcaattgcatattactagtaccttcatttttttctacactagacacttcaccatgttctcctgttaatgacgtaccttttgcaattgtagtaagtgaatgcggtttttcagctttttcatcacctgtccattcaacaatttctccatctttatattgttgatatgcgtcccaagctattttttgctctttatccggatttttagcgacgaaagtaaatcgctggaactgacctgttaaaattccttctcctgtcgcttcccatactacagttttaacttttccggcattatctttttgctcctcaactttccatcctggcactggttcatactgctggaactctactccagacggtattttcagtgtaacttttgtcgttgctacatttttttcaactggtacttttatcgtataagtctcccaagaaccaacgtcagaagttgctggttttacagtgacgtgcgcactaacaggtaacgaaaacattcccattgcaataattgttgcgatcattgttgttcctaatttttttatacgtttcattttctatttactccttttcatctataacatctgtttatcctgctactcgctagcagcatgattggtaaaattttatctgccacctacaataaatttaaaatctgtatcgaaactatcaagagattttgttaatccatgaacatgtatattccagtttcctgtcatattaatatacataccttctgcttcatattctcctggtgaaactactgaaactttaaatgaaccttttcccatgttcatatctaatgattgagtcgtcaatatcatttgttccatatcagtaacaggctgtcccttttcgtcctttagtgtaatatggaatttattttgtcctaccttattcggacttacatttagcgtaagttcatatccattatctaattgcttactctctgtaaatggtccagtaggaggcatcggtggtgtttgtacgtttgtcataaaagctacgattacgaaaatgataattccaatgacaaactctactttcaccgtagctcctaatccttgctgcgctcttattctccctttcacataatgaataattcccaatatccccatgaaaataaataatagtatctttgctaataaagccaatccatacttcgtatcaaataacgagtggattgttggaataaaaaatgtactattaaaaaggcctgttattaaaatcacaatgacagcacctgttgcccacggtgaaaaacgcttaatcatatcccaatacatatgccacttattatcctctttacataaaagaagaataatagatgataaaccaccaacccataatgaagctgctaataaatgtagaaaatccataacgacagcaatgtctttaaactttaaaccgtatgcgtgactattaaaggccttcataacaagtagccctataaacaatagtattggaatactccatactttaaacgacgaaaacttctcatgcttcaccgcaaaatacgtaacaattataagcgtactaatgagaaccatttgagtaatccatacataaccaaaaacagaaagctgtaatgtttcttttaatagtaaaggattgaatgcttctagccatgaaacatcagcatttattttcgcttgcagtggtagattgaataacaagctaatcaatatcccaaataaagagatccatattatgttcttactccttgatcgaaccgaggttgcattgcctttatacataataagattaaagaatagcactcctataaatagtgagaaacttgtatataaaattccacgttccataatcatatcgatttgtgggacgtagcccatctcttccacttgtatatcgtctgtttccgcttccgctaatccaacccggaacgggataactccttgaattggatgtccatcagctgaaatcactttccactgaatagagtaaagaccatttttgagattgtcttttaatccagcttctaatagctttttattttttttatcaatatgagcatcttttaaatcgatccttttacctgatgtatctctcacgtacaatgtattaaaacttgaaacttgtatgtcctcatcgaattcgatttttacaacagatggtgctttcttcaatgtttcattttcagtagggtttgatttcacaacgtacgcatgagcagatgcactttgcggtatcaatatgataagcacacacacaagtaatagccatgtccctaatcttctcattactttcacactcatttcacttctttcttcctcattgctctattttcattactttaacttccgaagtttaattctcgggcgaaatattaacctgattaaatataaacttctataaagtataactcttatttctcttccacctctaaacttctaatataatagtaactatcactatagatacaacttacatttttaaagccgattgttattatatcataaaatatatttatgtaagttatcaaagaagaaaagttatcgtgaatcatttgtgaaaaaaatgtgaaatacataaataaaaaggtattacgttattacgtaacacctttaaaaaaatatccctcttctatttctcttccggataatcacaatactcgataatcgttccttctgtatccgctgggttaagataaattaaccttctaccgtgcttattaatgcgtagtgtatgctctaatgtccgaataccttgttcttttaactcttctagagccacatctaaatcatcgacacgatacgcaacgtgatgaacacctttacctttttgtttaataaaacgggcaattggagatgttgtattatttgtcggtgcaagtaattcaattctatctccagccacttcaagaatggctacttcactttccacaccaggagcttcacttacgtaacgatctattaaagttcctagtaacacattttcataaaaacgtatcgtactatctatatctcgaactgcgattccgatatgatcaattgtttttttcattttatttcccctactactttattttttctcattattaatagtaacaaaaaaagctatagaaacaagtctataactttttttatttaacctattttcttatccgctctagttgctggttgaacttggtttttcacttttaaaatgctaataccatatccgataaatccaccgataatcgctgggaagatccagcctaatcctacttcctgcatcggaaggaatttagtgaacacttggcttactacttcaatgttaactccagctgcacttaatccatcaaataagctgatgataaatgttacgattaagcttacttgataaacttcagctcttcctttaaataatgaatggaagaatgttaagaaaatcaatacgattgctagtggataaattgctgttaatactggaacagaaactgcgatcaattgtgttaatcctacgtttgcaacaattgcactaaatacacatagcgtaattgcaattgctttgtaaggaacatttgggaataacttatggaagaatgaagaacatgctgatacaagtcccacactagttgttaaacaagctactgtaatcattaatcctaataatactccgccatatgatccgaaatagtagttagaaactttcgctaatacttctccgccgttctctaaatgtccaagctttgcaacacttgaagcacccatataagaaagtgctgtatagataattgctaaaatagatgctgcaataattgtcgcttttgcacaaacgaccataatttgtgttttcgttttcgcacctttttctttaatagcattgataatgataatcccgaatacaaatgatgctagcgtatccatcgttaagtatccttcttggaatcctttaaagaatgcatgtgatgtataagcttccactggtgcttgcatatctccaatcggatgtataaaagcaacgattactaaaataccgatgaaagtcaacttaattggcgttaagatttttccaacaatatcgacaattttcgcgggatttagcgaaaaaaaacaagtgatactaaagaatataattgtgaaaagaattaaaggtgtagaacctactccttctggcataaacggcttaagaccaatttcataagaaacatttcctgttcttggtattgcaaataacggaccaatcgctaagtataaaactgttgtaaacacaatcccaaacactgggtgagcacgactagctaatgactgcaaatcatctttacctgaaaaaccaaatgctagtacacctagtaatggtaatccaacaccagttactaaaaatccagcgttagcaatccatacattctctccagctgattgaccaagcatcgctggaaaaattaaatttcccgctccaaaaaatagtgcaaataacattaatccaataactactatgaacgaaaacggtactttattcgccataatataacccccattcaagtttccttatctcattttccaattttaactaattgaattttctgaatatttaatttaagtatcaactattcttgaattcattatagtttgctatataatattttgcaatactattttcgaacttttcttttattttataaatatacattttttaacatgaaaaatagactaaaaaaccaacatggtcatccatgttggtttttccatttactatcatgaattaaaattttgctgctacttttttaacgttttctagaccttcttcaacaatttgttgtgaacgatctggatattgattgtgtccttcaattacaactgtctctggatttgtaattccccagaatccaagtacagttgttacgtaattaactgccatttccataggagccatttgttctgaagagtaatctgaaccacgagcacctaacacaactactttcttaccaccaactaaaccttctgggccatttgctgtatatttaaacgtttttccagcttgagataagtatgaaatatatgtgattaatggtgctggtactgtaaagttccataatgggaatgcaaatacaaccttatcagcttctaaaaactgatttaaatattgatctactgtagcaactgccttctcctcttcagctgttaactccataccttggctacgtttatatccacctgaaatcgcgatatttccgtaataaggaagatctaatgcaaataaatctaattccgtaatttctgtatttggatttgcttctttataagtacttacaaatgtttcatacatttttgaactaactgcttgctccgctggacgatcgtttgcttttacaaataatacttttgacatttttttattcccctctacattcttattttcttcttttttaccaaataatgagctaaatagtcccattttcttcacctaatctttcttttcatattcattattcatcatcataaaaattcttattctaagaaaaagttccaatagataccttaagttacgccgttgcaactttttgttatttaattaccttatgtaagtgattgtaatatagtcacttactttagtcaagtaacttttaataaaaaataaaatctcgacttaaaaatattaagcgagatacaattgaacaccaaatacatctttattacttgtataataaacttagagaggaaaattcatatatagaaaggatttattcatgagcactatagaaaagattcaaacttttattattctttttgctgttacatgcggcatcgtactcggacaatttaatatgatacatacgtattcagacaaatttattgtccccttcttatttttcatgctatatggattattcctcagcatcccattaaaagaaataaaaaaaggatttcgcaatttaaaatttgctggaacaagtcttactattaacttcttatggacacctttactcgcttgggggttaggggcactatttctttccgatcatccagcactttgggttggatttataatgttaatggttactccatgtacagattggtacttaatctttactgaaatagcgaaaggtaatgtagcactttctactgcaattttacctgtaaatttaattttgcaagtactgctccttcccatttatttatttttatttgctggtgtcatgaaaactgtagcggtttctgttttagtagaaagtattgttatcgtaatcgtcttaccatttatacttgcacacgctacaaaattcattatgaataaaatgaaaaaagctgaacctctcgagaataaactcattccgttttttagctctgctcaaattgtatttttaagtttagcaatagtagcgatgtttgcatcacaaggtaaatatttactacaaaatatgaatgttgttttattattactcgttcctgttctattgttcttcatcatcaattttttactaggacaatttatcgggcgcatgatgcatttatcttacaaagatacagtaagtctaagcttaacaacgttagcaagaaactcacctgttgcactcgctatcgctgtaaccgcttttccagacgaacctcttatcgcacttgcactcgttattggaccattgattgagttaccggtactagcttgtgtgtcacaagttttgttgcttattaagaaaaaacggcaatacgcataataaaaaacgtcccattttgggacgttttttattatggaaaaattacatacaacacttatttcttatttatcattacaaatgaaattaccgaaactacaaacataataatacccattataaatcgatgggctctaaaaatgttatagagaattaacttttcgttacattaacagatcctttctaattaaaaatgataggaaacgtaaatataacgaaagctgcccaaagtccgtatattggcaaatacttcgtaatggcatcttgaatagctgtcggtcctgatttgttttgcaagaaacgcatataggaaaacataatccaaattagatttgcccagatcagtatatttacacctaaaacagctagtctattaggtgtagtcccgtaagatgaaagtctaaatacgatggctgacaatgcgacagtgtcaataataagcgccagaacaattaaggaaacatttatataatctgaaatgttctttttctcgtccgagtcactctcaacgatagaaaatatagtaacagccaatacaccaagcagtattccgttgaatgccattaggaaattacgatccaagaacgggtttttcccgaccaaaattatcgttataagataaataaacaatgtgaccaggacaagcggactaaagattttagatatgtatggtgtaatatttttagcaagcttaagattcattgatactaagtatgcagccacaatagcgagagccgctgctccaaataaaacaacattactaaaatagaattctcctatatctaagtcaacaaagctaaataaacgcatggtgaatattgctagtatcattccgctcactgccatgctcccgtagagaagacaatattctaaattaaatttaatataggctaatcttgtactgccttttgaatattcatttcctgtaaatgcaagccctactaagacccataaaaatataggaagatgtaaataagcaagtatggtactgtctttataatttattggcaatgtattaagatacaccccggaaactaggaataacgctataagggaataaataatactttttttcggcttattattgtaaacaaaataagcagcaataaagggaattacaccaaaagccaagtttattggagcaattgcttcctgctcaacaaagtggaaaataatcctggtgcttatgccggccaaaatagctaaaaggcccatgaataagaaacctttttgaaacaaagatgttttttctttatttactttctccttgaaatgcaacctttcataccaagcacctagaatttgagaatcagggttttggtcccatgcttgtgagaatgcttttttaaaagctttcggatcttttctatacatcttctccaactcatgggggttatccatatgtttaacaatcaaattgttaatattcatagttatacctcctctaattttaaaaataaggttgttaccttttaacaaaagcacctcactcatttattatgattttgattttaatacaaaatttatcgttttacaataaaaaattattatttaaagcatttttttatcgttaaatttcatttcaaagaaaaacaaaagagcatgacaattttatgtcatgctcttttaacaaattaattctcaaatacaaaattaatcttattatctttccactctaatttcgcatcaaacgttttctcgccctttttaaagcctttaattaaatcagtcttttcaccttttaagagctttgtcatattcttttgcgaaattgttttacttaatatcttctttgaaatggtgaaatcacattgcgttgtattatagttagaacaaccgtaaaacgttgacttatcaattacatcgccatcacattttttacagctaccaacctttttacccgttgtaaatttcgatccttttcgttcaatcgattcaacatgtagtcccgtgaaatcccacttctcagacatttccactgcgtcttcaataattttagctgatagctttttcgtctgttccataaatgtagctggtgaagctgtaccttcaccaatttccgcaagacgttgttcccatttcgcagtcatttccggtgaagctagtattttgtcaccaattgcggtaattaatacttttcctttatcagtcgcatacacttggtttttctttacatctatatatttacggtctttcagcatcgtaataatacccgcgcgggtcgcttccgtacctaaaccttctgttttcttcaataccttctctagctcttcattctctaaatacttaccggctgttttcattaacgtaataagttgtccttctgtataacgcttcggtggctgtgtttttccttctttcactttcacctttacaacttttccttcttcaccttcagctacaattggaagaatggtttcgtcatctttatcgtcttggaaaataactttacgccaaccttcttgaatttgctgttttccttttgaaatgaattcagcacgttcatctacaagcgttacaatcgttgtatagtcaaagattgcaacttcataatgagctgcaataagccttcttacgatcatatcgtatattttcttttcatcacctgatagtctgcttgggtttgtaacttgctctgtcggaataatcgcgtagtgatctgttactttcttttcatttacataacgcttattgttcataatggattcaaccggagccggtaataaacctttatattcatcaaactgacttaacttctgtaaaatatcagggaaagtcgctgcttctccttgagtaacatagttagaatctgaacgtggataagaaacaatccctttttgatagagtgcttgcgttatatcaagcgtctttttcggtgaaaacttaaaggctttatttgccgttgcttgcagtgatgataagttgaataaaagcggcggctgaaactctttacgctccgttttcatttccttcacaacagccggtttcccttggcaaaatgccgcaattttattcgccatatcagggtcttttaagcgggattcattatccttctcccatttcccgtcatatttctttccttctatattaaaggttgcaaacacttcccagaaaggctctgacttaaagttttcaatttctttctcacgctttacaatcaatgctaacgttggtgtttggacacgaccagcagaaaatacatcattcattccttttttctttaacaaaatactaaacacacgtgatgcattcatgccaacaacccagtcagcacaagatcttgtgtatgcttcgtaatacgtattaattgtatctgattcatcaagtaaatttttaaacccttgataaatagcttgcttcgttaaagacgaaatccatagacgcttcataggcttttgcacattacaaagattaataatatttcgtacgattagttccccttcacgcccagcatcgcctgcgtgaataatttctgttacctgtggattatgtaacagctgtttcacaacgttaaattgcttatactttgactttgttacttcaaattgaaaacgctctggaatcatcggtaatgtattaagtgaccattttttccactctgcgtgataatgctctggattacataactgcgtcaaatgaccaattgcccatgtacagtacgctccatttggaaataactcattcgcttctacctctaaatatccatctttccggcgatatttaaactgtgaaacaagagccaacccttgatctggtttctcggcaataattaatttcattttataactccctatctgtattccagtgttactttcattgtctatatgtttagaagcgatgataaaacaacaatcttatttatcattcgcggtttgtctcgcaaatgggagacctataatattatacgcttattctttatggcttcacaatagaaactcataatataacaatttctttcacatgcttacaattaaaaaagacgccctaaaaaatcaagcgttcctttgcttacatctatgaaattgtgcagataatatgcagatataaattatcataagtacacatatgatgaaatgaacgataggacaaggaggtatcataatgtttgcttatacgttaactaccttaacactttgctgtacctcaattcttattgtatccaatatttctaaacgtaaggttaccctaatggagtatatggtatttattatgtcttttagtatgagtatcggtttaagtattggtttttatttaggcattctctttaagggggaattactatattctactttacttgctattttaattagtggttttatcggttttttagtgggtctacgttttcacctatatactgctttagaaggaatgttctctggattaatggcaagtatgatgggagcaatgattacagaaatgttaaacgctcaacaagctcatagtatattgttcattagccttttacttactataacgattactatgtcctgtgtgattcaattgttatcggagaacttttctacttttatccaacgtcgttttttgttattcctttcaattagtgtagtaattatcgttgccgtattcgcgacattcccagatcatactcctgcaccttcaccttcacctgggcataatcaacatatacattagtacttgcaacaaaaatgaataagcagctatccataggataactgcttcctattattctggcttattaggaatgttttggtttggaacatagtcagatttataatctgtatagttcacttccgttaccatccctgctgaagcatgatgtaggtcgtgacagtggaacatccactcaccgggattgtctgctacaaaggctacttcatattcttctcctggttttaagttcaatgtatcttttacaattggagaaccttctatcggttttccatctttactcaacacctggaagaagtgaccatgtaaatgcattgggtgatcatccattttagaacgatttaccaatttcacttttactaaatcaccctttttcacttgaattgggtcaatatccggaaatacctttccgttaattgtatataccatttcattttcattcatttgcgtatttaagtccatattatatgtggcagtatactcttgatttaacgtgaaactacctaattttttagcaccatatttcgtcatatctaatttcgctaattttcccttttcatctgctttatctttcatctctttgctgccatcatactcaataacagctttcattccttttgcacctttattttttgaatggtcctcaacataccacttcccaggattattagcagtaaattcaatatcataacgttcacccggtgcgattgaaattactttatcctttataacttttggatcgtttattggttgaccatctgtcgcaattacttttatatcatgaccgtgaacatgtatatcatgtgatagataaccagcattaacaagtcgaagacgaactttatctcccttattcactttcaatggcactactaaatcaccgctttttccattgattgtgaataaatcatacatactcatatcatgaccttccatcttcatatttccatggtccattcctgccatattgccagagtctttttgatcactgcccatgtccataccagaatgatccatgccgttcttatcatcattctttttcgtattttcatcacctttagatttattacctatttgcccttttgtcatttcttttaactgctttttaatttcttctttatctgtaacccattcatccaacagtaatgtgtaatctttatcatatttttcctttgtatcctctacaatgagcgctccatacaaacctctatctaattgatttacagaatcttgatgcgagtgataccagtacgttcctggtacgttcgcttcaaattcgtaagtgaaactttttcctggttcaactgcatcttgtgtcacgcccggaattccatccatgttatttgggacaggatatccatgccaatgaatagatactggtgcagataattcattttttaatgtcactttcaccttttcaccttttttcacccgaatttctggaccaggagatgagccattaaatgtccagactggaacaataacaccgttacttaatttttgcttttcttctttcgctattaaagtaacttctggccctttttcaaccttcaatggtgttgtagctgtttcagtctgtagtgttttgttatcattcatatttttatgatcatttgttgtatttgtcgtcacagaacaggcagcaattaaaaatattacagagacagtaacggctgctaatacaaatcgcttcatggacaatccctccttattctttttcaaaatcattatagaagttgattttcaagaaaataaggagatgtaattagatcttacgtaagctaattggaaaattactaaaagcggagacattacaagagacgaatattttagtaatacaaaatgctttccttgtagcgactatattagccgttctcgtatttgttttgacgttatttcttaagaaacaataacactgctattattaaataagaaaaatgtagctaaaatgctcttcacaaaagaacttagatttttgtataataagaactaatgttcctcacagacaatggactcaaattacacaaatatatcaaatagaagaggattgatatacgatgaaaattgatagaccaaaaatttcaccagagttatcttcaaagaattttcaagatattttttatgaagaagatccaacattggaagtgtgtgaaattatagactccactttcgaaaatgaatctgtagatagagtgcggttatatgatgcggtgataaaaaactgtaagtttactaatacagactttagcaatattgatattacagatgtttgttttgaaaactgtgatttatcaaatgttaatttaagcaattcttctgttcacagagtcgaatttaaaaacagtaaattaatcggagtaaatttcacaggatctagcttaggaaatgttaaatttgagaattcaattttgaatttagcggcatttggaaattctaaactagaaaaaatcatcttcaatgaaacttcattaaataatgcagatttttttgactgtaaacttaaaaaagttgaattccaattatgtagtcttgatgaagctaattttgatcagacatcactgaaggggatagatattagttcttctacctttgatacacttacagtttcagtgaacgatttaagaggatgtaaagtatcgacatatcaagctgttcagtttgctactttattaggattaataattaaagattagtatttcgaagaaaagaaccctatcccgaatcatggattttttaattgtccacgattcgagataaagttcaaataaattagtgatgactcttttattatttaactacagcttggtttccttttacatgttcattatttacactcataaattcttcaatttcttcaacttccctaatgatatcttttgacaagttttcatacccgtctttcgttacaagaatgtcatcttcaatacgaattccaattgattctccttcaatataaagaccaggttcaattgttataaccataccttcttctaacactctatctttatatgttcctacatcatgtgtatctaaaccaaggaaatggctgacaccatgataatagtattttgataactcttcatcttcttgaattaaaccaattgctttacactcttctgccagtaccttttttgtatgctcatttaatgcagcgaactttaatcctggcttaataatctctgttgtttcttttaatgcttttaatacaatattataaatttgtttttggcgactagagaatgttccatttgctgggaatgtataactaatatcagcgttatagtagtctttttgagcacctaaatctagtaatactaagtcaccattttgaatttgtgcatcattatcttcataatgaagaactgtagcatttttcccactcgccaaaattgtattgaacgcatggtacttaattccagatgacttcagtgtaaaatcaaattgtgcttctaattcatactccatcatgcctgcttttgcatgcttaagtacgttgtaaataccgtctttcgttatagcaatcgcttctttaataatttcaatttcttcctctgttttaaatactcgtaattcacaaatgttcggatatacattaccaattgttacgtgtgggtatttttctcttacatgtttagcaaatgctaatgtttttgtctccgtaccattccaatcacgacgttctatatctaaatatagatgcttcgcattttctgtaaaaagtatatttgacattgtcttttcaaagctatctaaatatataactttctttatacctgaaattttctctgcttcttcgttagaaactgttttaccgacccatttttccattactggatctgccttttcaatgaaaagtgtttcttcaacactacttccaacctttttcagcataaaaataacatttggttcatcgattcccgttaagtagtaaaaattacgattcggtacaaatttataatgtgcatcagctgacatatgcggtgcttgtcccgcaaataaaatcgtaatagatccctctggtaatgtgtttgctaatcgttctctattttgagcaaaaaatgttgatttcatgataatccccctagcgttttatgtataattgtgaaactaattattcaatacacttcattctattattgttataatttttcgtcaatttttaactaaattttagatagtattgacacaggcaactaaacaagttacaataactataaattagtaagttgctaatttaaatttaaataagaggtgaacaaaatgcaaaacattttattccgtattaacgaattgtcaaaaaaagaaaaagcgaatggattaacagttgatgaaaaacaagaacaacaaatgttgcgccaaaactatacacaaacatttcgtggaagcttagattccattttattaaacacaaaaattgttgatcaaaatggtcttaacgttacacctgctgcattacaagatgctcaaatacgtttaaaattaagcaaatgagttccgagctaaagaattctaataaaacataaaaagagctggatttcctatatagaaattccagctctttttattttcttttttaatttagtaaacgagcgatacatcgcaattctccacgacacaatcatcgcaaatgcaagtaagaaaaacattccacttaactccgctaaatcaatcgattgacttaaatatgatttcaacgctactcgtacagctaataatccgactaaaataaatataaatgcttttgacggtttcatatatatttgttcgtctcttatttcaaacttcgttgtttttataagaaatacagagaaaataagccctgcaataattgcttctattatttctaacgacgttaatcggaattccggtaaaaagtacatcattgctccagtactcataaaaattggcggcaatataattttctttttcgttaccggttttttcgctgctttaaagcgcagaaacatgacaccaacagccatacaaaccgctaaaatacttgataaaagtgctatcatactcttcccactcctatctatttaaaagactttttgagcaaaatcataaaccaaacgagcccgatacttataataacatgacctaatccagccatatggcttaaaccgtaaaagtcagttccatttacttgtagaagacctctccatagcattgtaacaatagtaaagattactcctacattataaacaacaaaccatgcacaaaagctctttgtttcttgtacatgaaacactttacataaagctaaagcaattaaaaagaatacaaaaccgagcactaatacatgtgtatgcactaattgcaacattgtggatcctttaattccttgtgctttcgaatactctcttgcaaatacacctgataataaaccaataattaagtaaataaatgccgcattatataatttcttcattctattcctcctgttgtaaactttctatattcgctgcaattattttaagcaaagtttatgaacggagtatgaacaaaatattacattcaatttttgaaaataaaaaagccattccacaaataataattgtagaatggcttttcaatttattttaaatcttctattgagaaagcacctggcagtaactgctcaacagtcacttctttttcatcaccttttacattcgttaataatacaggcattttcgggtcacagaattcagcaattacttgtctacacgcaccacatggtgaaatcggtccatcagtttctcctgtaataactaagtaactaaaatcgcgctcaccttctgatactgctttaaatattgctgttctttctgcacagttacataaaccgtaagaagcattttctatattacaaccagtatagattttcccttctttcgtaactaacgctgcgccaacaggaaatttagaatacggaatatacgctttcgataacatcttgtttgcttcttcaatatattttttcttacccatattatttccccctcaaagtaaacgaaatgatgattagtcagtaataactgtatgaactaatttaggagccactgctgtttcagcgatagagatgttctcataaatttttgcttttacatcttctacattttcacgatttgcgtagattgttacgaatggctcgccttcttttactgcatcgccaacttttttacgtaacattaatcctactgctaaatcgatttcatcttccttcgttgcacgacctgcaccaagtaacatagctgcaataccaatctcatctgcaacaatgttagaaataacacctgaagtttttgcaggtacatcaattacatacttcgcctgtggcattttttctggattgtctacaattgagctatctccgccttgattgcttaagaactctttaaacttctcagttgcttttccgtttttcataacttcaattagcatttcacgagcttcttctaacgtatttgcttttttcgcaagtacgaccatttggctacctaatacaagtactaattctgttaaatcttctggaccttcaccttttaacgtatcaatcgcttcttttacttctagagcgttaccaatcgcaaaaccaagcggttgtgacatgtctgaaataacagccatagtttgacgtcctacattatttccgatacgtaccattgcatgtgctaattcttttgcatcttcttctgttttcataaatgcaccagcacctgtttttacatcaagtacgattgcgtcagcacctgctgcaatttttttactcataattgaacttgcgattaaaggaattgagttaaccgttcctgttacatcgcgtaatgcataaatctttttatctgcaggtgttaagtttcctgtttgtccaataacagctactttgtcacggtttacaatatcaatgaactgctctttcgtaatttcaacgtggaatccttctaccgcttctaatttatcaattgttccgcctgtatgtcctaaaccacgaccagacatttttgctactggtacatctaaagcagcaactaatggtcctaatactaaagttgttgtatcaccaacaccgccagttgaatgtttgtctactttaattccttcaattgctgataagtcgatcgtttcaccagactcaaccatcgccatcgttaaatctgcacgttcgcgatctgtcatatctttaaagaagattgccattgcaagcgcactcacttgataatcaggaatacttccgtctgtatatccattaataaagaatttgatttcttcagtcgttaattctttgccgtcacgtttttttgcaataatatctaccattctcattacaatcaccattcctttttatatgatacgaatctattaaaataataagccaacgattgttgctgataagaaacttactaatgttgcaccgaatagtaatttcaaaccaaatcttgcgactacattcccttgcttttcatttaagctcttaaccgcccctgcaataatcccaattgaagagaagtttgcaaatgaaactaagaatacagatataatcgctgtcgttctatctgagaaattaaagtttccttgtgctaaatctgtcatagcgacaaattcattcgatactaattttgttgccataatatttccggcattaactgcttcatgccaaggtacacccataataaatgcaaatggtgcaaatacataaccaagaatttcttggaatgaaataccgattacacctttaaatactgcattaatgaatgcgataagagcaacgaaaccgactaacatagctgctactgtaatcgcaactttaaatccatcaataatgtattcccctaatacttcaaagaaagtctttttctcttcttcttgtacttctaacatatcttcttcctcagtaacttcatacgggttaatgatagaagcaatgatgaagccaccgaataagttaagcactaaagcggttacaacatattgcggttttaataacaccatatatgatccgacgatagacattgaaacggtagacattgcagatgcacataatgtatacattcttttctctggcaataaccctaattgtttcttaactgaaataaacacttcagattgtcctaaaatcgcagaagcaactgcattatatgattctagtttccccattccatttactttacttaatgctagaccgatagatttcacaataataggtaatactttaatgtgttgcaaaatacctattaaagctgatataaatacgattggcattaatacacttaaaaagaacgaaaactctttttgatttactaatccaccaaatacgaaattcacaccatcagcggcatattttaataactctccaaaaccatctgctattccgctaattaatatattccctacacttgtatttaataataaaaaccccaaaataaattgtaatataaccatcgttatgattgggcgatatttgactttctttctattattactagcaagccaagcgatacctaaaatcaatacgaggccaaaaataccaattaagtatttcataagccgtctcctcccattcgtatccgcttacatttttttcaattattaaagcaatagatacactttactttgtgtatctattgctcttcacttcattaatgattagtagttatctgtagcaccttttgcatcatttaatacgattgcaacactagcacttgctccaacgcgagaagctccagcagctaccattttgtctgcatcttcacgtgtacgaacaccgccagatgcttttacaccaacgtttggtcctactgttttacgcattaatgcgatatcttcagcagttgctccgccagttgagaatccagttgaagtttttacgaagtcagcaccagcttttactgataattcacaagcgcgtactttctcttcatctgttaataggcaagtttcaatgattacttttacaagagcttttccttttgctgcttgtactacttcataaatgtctttttcaacaagttcgttgtcaccatcttttaaagcgcctacgttgattaccatatcaacttcagttgcaccttttgcaatagcatcttttgtttcaaatgcttttgtttcagtcgtgcttgctcctaatgggaaaccgattacagtacaaacgtctacatcatgtccagctagttcatcagccgctaattttacccatgttgggttaatacaaacagaagcgaatttatattcctttgcttcttcgattactttcataacatcttctttagtagtattagcttttaaaattgtatggtcaattaactttgcaatgttcattatcttcactcctcatatcttttaacaacttcattctaactcttagttgaacaaatgtaaatacacttttgaaattttgttcattctttttaaaaggaatcatcttgtagtaaataaagcgcattctaacaaagaacatttcagatatataatcaaaatttttatgttaacaatggtagtatgtatctccatatccataattatttttaaaaaggcaatttgtgttcaaaaaaactcctatcattcatacataacaaaataaaaggcattctcaaaattaacatcttgagaacgccttttatttctaatctttttgataatgtaataattctttcgctgtatgctgatcgataattaatacatttgcatacccgccacgtaacgcaccatcaattgcttttatttttctattaccacctgcaactaaaatagagcgtttctttaatttcagttcctctaactcaattccaattgtacgctgattaatctcttcgctactaatatttccgtctccatcaaagaaacgtgaacaaatgtcaccgaccgattgttttttgagtaaacttgtttcatccttatcgaaataacctaatcggaataatagcgcttcgtctcgcactgttcctacagtgaaaactgcaatattcgcttgtttccccatttcaataatgtgatgaatatgtcgatcctgctctactaattcttttgtcactgcattatcaaatataactggaagaggtagatttcttggcgtcgtttgaaaagcatctgcaaataaagctatcgtctcattcgcatatgtatttacacttgaatgactaataccaccttttagctggacaacctccaccccttttacatgttgcggtacgatttttctagcgatttcatacatagtcatgccccagcttacaccaacaatatcaccgtttttaaccgtcttttccatatactcagcagcatatttacttatatactctgtaatcgttgcatattccggcactggagaaaatacaacatgtgcctctaacaagttgtacttttctttcagtaaattcccgacgttatctaaatcagcaaatggatcggcgatgctaatttgaacaaaccctttttctttcgcgtactttaacaatctagaaatcgtcggtcttgaaatatttaatttgttagcaatttcttgctgactataatctgattgataatataatcttgcaacttcaacgcttaattgttgtttatctttttccatagtaactcattacaaatcccttcctgtatttccctttcgttacaagcattatacagctttatgcaaaaaaattcgactaccgaattttatctatctgaacttctactacacttaatatataatgaaaacttattgtgtagatttacaaactcaatatagatacgcttgaaacatgtaaatcaattaacatttaattcacattttttctgtagtaacgataacaaagccgttcaataagaaacatgaaacatcatctaaaaactattcaaataccccttataaacagaagttactatttataaggggtatttactcaatttaattttataaaaattggatggaaacaatgcaagttctcacttatttagaataagtgaaaagatgatgttttatttgttcaataaaataatgatggtgtatattatcgttagatactcgacttgccataatagccccctccattgaagaggcaagaaaggaagcgagtgatataacctctatatcttctttaaattcttgtttctctattccttcttttatgagagaagccattaacattactgtatcatcataaccttttgctgctgctttttgtaattctggaaatactccagtactttcaatggcactattaagtaatggacagcctccagcaataggaggattattagctgcatcttgatatacaaggaaaattgcaaggattttatcaattgctgtctttttattttccattgctttatgaaaatgactccacataatctcaccacttttgtcgtaggcagcaaggacaatttcttctttacttttgaatctacgataaatagatcctttaggtagttcagtagctgtcattatatcctggatggatgtgcgagttatcccattagtattaaataaatataaagatgtttcaataattttttctttaaccttatcaactttagtcatgctttgtaatcctcctaatgaaaaccatcctaatattctaggtaatgtttaccctctattttcttaatttttttgtaagtataaataagtttggaacagaaatatcttatcaatccctatcttatggaaacctcaaacaatacagtttgaaaagaagttaatcaaattgtattacctacataaattaagtgaattttccgtcaaaacaacatgaccaattgtttaattcagtcatattatacaactaattttatctaaaatcgtagaggtgtaaaaatatatagttaattttaatgtatagacatatgattattatatataatttttatcaatatgtttagctaaagtgtttgaactactcccactttcacttcattctataaaagattaaccattaatgattactggaattaaattgtaacaaagcaactgaaatataaatatatttgcttttttccattttgattttgttaatactttataaaaagggtttaaaaaactagaaacttgtagtatcattagatttcgattcagaccgaaccgtccggtttataatcttatataaatatatttagaaggagagcgttatgcagaaagaaaaatcaaaaattataggtaatttaattatgggggcaatacagtgaactttataaaaatgaataaaaaagaaatcattatgctaataatctttacactgtttgtaccatttcaaattggcttgtacatactatttggcatatcacttttagctaatgtcaatttagttgaatcagaatttgttcttagtgccatcggttttactgtacctgctattgtaggaatcatttactttaggaaagaaattattgaaagttttacttattttaaagagaagacaattttgaaaatagtaagtattcctatggtagttttatttacgttaattgtggaacagtgtgttatgcattttctagcaactggtcaaccagagaaccaagagcagctccttgaaacgggtgcagaggtacctcttgtatttacattgcttgtatttggtattctgggtccaatacttgaagaaattgtgtttcgccacatattaataaatcgtttttcttaccatattggtactgctattgcatctatcatttcgattatgatttttacacttcttcatacgaaccaactttcggatattgctatttatttacctggatcgttgatacttactgcggcttatcttatttctaaaagatccattgcatatgttatagcgatacatatgttaaacaattgccttgctttcattctgtaagaaactagacttgtttctgatgccaaaaatattctatgtttctatcaagcatttttggtaccagaactactttttctatgacataagaaagctaatcaaaaattataaaatattaggagagtgtcagtcatgattgtaacaacaacttctggaattcaaggtaaagagattattgagtatattgatattgtaaatggtgaagctattatgggtgcaaatattgtccgcgatgtattcgcttccgttcgtgatgttgtcggtggccgtgttggtgcttatgaaagtaaactaaaagacgctcgtgatattgcaatgggcgaaatgaaagaacttgcaaaagaaaagggtgcgaacgctatcgttggtattgacgtagattacgaagttgttcgtgatggaatgttaatggttgctgtcagtggtacagctgtacgtatataagtaaataaaaaaacggttcctcttggaatttatactttgaggggaaatcctgattctgttgcagattttaaagaataaaacgagaaataatcaacttttttatttctcgttttatctacatatttatttttggaaaaacaatctaactccaaatactaataatacggcgcctgtaataccctctattgtacggttcactctttcttttcttaaaaaagttcttaattgacgtatgagtgagatgtaaagtaaataccatattgctgtcaaagtcgtaaatgtgagtcctaacaaaagaaattggaagaaatgattttgattactcacaataaattggggtaaaaaactaaggaaaaatacagcggtttttggatttaaaattgccgtagtaaatccttgtctaaagcttttaattgccccaatatccttagagtccatttctgctgaacctgacatatcttcttttttatgtaaggcacttttaattgactttacagctaaataaattaaataaacagccccagcatattttataaatgtaaataacatagcaaatttcattaagatagcagaaagtcctaacgtagccattattgtatgaatcatcattccagatatcgttcctaaaacagtctttatcccgccatttttaccatgcgagatagtattttttgtaactagtgcaaaaccaggaccaggcatcattatgattaacattgctgtaaggataaataatagataattttccatgttgtagtatttcctctccaatttttagttttgcttacagtatagcttttttcattaaaacattacatataaaagacttgatcagaaatgtatttaggttattcgtatcaatttgattaactattacccaatagccacattgataaaacacatgacaaacttatatataattgcaagctcaactctcacaaaaaaacaggatgaaaaataaacagcagaactagtccactgtttactttgccacaccttcatgtaatttttctgtataatcttttacatctttccagctatctttcgctgtatgtaaatcttcttttataaacgtaaactcttccggactaattccttttacgttttgtaataaattattatactttgcacctactgtataccattgatttgatatgttttgtagtgctgtaattgctgcatcaattgtttctgtcatgtttgttgttttattttttacatcagtcaaaattacgacttctgcttgtgctcctgaaattctatcttttaaattggcgatttctctttctgcatttgcgatatcttttttcgcaaccgcaatcatcggcccgccagcaagacatgttattagagctacgcaaagtacgccaccagcaatgaccatatcattactctttttaatcgaatcgttatatgtatttatttgttgctctagagctggaataccagcattcgtacttgccaatatcgctgttaactgatttgtatcctctttgaaactatttgtatctttcgccattctatcgcgaaaagctttcaaatttcctaataatccatctacctcattttgattctttacaatatccgcatacaacttttctaaatccgcttttaattttccactatccttttgatcaatcgctattaacatgtcattataatacgattgaaaagtattattgtaatttataatattttgatctgttttcataatttgaggcttcatattatttaaccaatatgctgcattaatttttgcatctctttgatgctgaatcatactccctttaaattcactattaatcgaacttattttacttaaatccgtctcttgttgattttgaattaattttgcatatgaatccattgcaaatatgcttgatgtcgtttgtgccattacatcttggaatcctgctggtccaagagaatagtttttcacattttcttgtagcaccgttacattttgttctgctgcaaaaggatgtaaaggaaatgcgttactcgttgccaccccagcaatcattaccgctaaaagacattttttataaaatcgtttctgcatatttttcacctattctctttataaggatatcaaaagctcctgctcacaactgaacaggagcttcaaatcattcatcaacacttaacgccctaacgattcgtattcgattatgcttttttcgtatctactactttaatatcttcagcataaatcttttctgcatagtctttaatgtttttccagctatctttcgcaatgtttaaatcttctttaatgaaaacaagatcgtttggactaattgaatccacattttgaagtaaagaattgtattttgatcccattgtataccattggtttgaaatgttttgcaacgctgtaattgcagtatcaatcgtatttgttaaatactcagtttgtgttttaatgttcgttaacccagctacttctaattgagcagttgtaatttgtccagttattttttgaatttcagcttgtgcattgtcaagttctttcttcgctaatacgataccagctgtaccaccgcctacagctgctgcaccacctgcaattaatgcgactcctagcggtgttcctgcgcccgtagcaataactactgcaccaccaataattgcaattggtcctagagctgtcgcaacagatgaaccgataataattgcattatatttactaattgcttcattgtacgttgtaatttgattttgcagaagtggaatccctgcatcttgactagctaatatagatgtaatttgatttgcatcacccttgaagttttgcgtatccgacgtcattttatttcggaattttttcaagtcttctactaactgatccacttgcgctttattttcattaatactacttgataatctagttaggcctttcgtaagagtcgctttatcttttgcatctaccgcagcaactaaagtatcataatagttttggaattttgtattgtagttaatgatgttttgattcgttgaaataagctgtggctttaatacatctaaccattgcttcgcatttcctctagctgtatcttggtgctgaatcacttttccttttaaagctgcatcaacagtcgatacatttccaaagttaacattaccttgtttaataattgttaaagcatacagatccattactaaagcatttgaacctgttctttccattgcatctttcaaaccttctggtcctaatgaatattcttcatagttattataagcttttgctaccgcatgaactggagcttgtttcactgtactttcagctgcatacgtatgagccggcataatatttcctgctgcaaatactgccataagtgctgatagagccattactttatatggtttttttgtcatttttcttctctccctatatcgctaattatttttctatttaatgtacttcaacgtttgtaacgtaatcttcaaattgatttgtttgcttattcatttcatcacttacttttttaatttgattaaaatgtttttgaagtaaactactgtctgtatacgtgccttcttcaacatttgtttgaatttgaatcatattattatttaaaactttccaatccgttaataacgtttctaaagttgtaatttgacgatcaattaattctgtaaagctatttacttgatcttcaacgaatgtaatttgagtcgcctctgcttcagtttgtgataacttttgaataagtggcaataactctttttgcttttgctgaatgcgaaaagctgcttctctcgtttgactatctgcagcatttacaatttcattacttaaagtaccgatagaaacaaaatcgattgttttcgtttgtgcagtttgatttgtgattgtaaatacttgtttaccgatattaatagaacctttaattatttcttgaggtctattcaaaatagtagttagttcagcttgaatttccccttgaattcttttaatatcttctcttaatttcacaatatctccacttgatccttgcagtgtttttattgcttcatcggctttaattgataagttgttactatctttgtctaatactgttttaaatcgatttaactctaataaatcttgctccatactctcttggatgctctgtacttgcaattgtaattttccatatgcactcataaaatctgtttttgcttgctgatcttcatttacatttcctgctagttcatagagcttactataataactattgaatctagtgctgtatctcatcatctcttgatttaagtcaattagcttcggattatattcatcaatccactctcgtacattcgcctttgcaaacttttgatgattcgttaagctactcatcgcatttaccttaatgtctggctgttgcaaaataattaatccgtatgcttgaataagcggtgattgtgatcctaacattctaattgaattggataatgtatttggagcaattacattttgcgcatatactgttttcacttccgtttgcccctccttagcgtaagcgcttacaggaatgaagcaactcgtagataccgctgtaaccaataaccctgtaattaaagtctttttcactttaactcctcctatgtattagcaactattactatcgcattttattattctattttcttgcccataatttgagatggttaaaatagagaacgttctcaacgtgatctatgtatgaaccacctctctcgtattgctacagtacttacttatcgtcacaaaacatttcattatttttcatatgtgtttagtatgaataatattgtataaattttctatttcatcgaaattcccacattcacacagtgaatatattacataaaaatattattcattttaaactaaacaacatacgtaaatatgaaatttcattttgttttcatataagttttgtactgtaaggtcatttaaacacagctgtttatatatcgtaaagaagtattttcattccctttattttcaagctttcatgtccttatttcaaaatataatccgattcactttatcgattgaaatatctacatatcacaacagaaaacactactttcaaataaccaatgaagttatattagtataatttttaaccccatatgcaattatgcatagcatatacacaaaaaggatagcttcattttcgcgaagctatccttaaaaaattttcttattttttcaaatgatatggaactgtcgtaataacaacatttcttttataaagtaaatacgcacgtataagtaaactggattgattatgaagaatgttatgccaaccttttttcggaatgaactgtggtataacgaccgtaacacggtaattcgattcacttgccttatattgcactgtatcgataaacttcgttagcggctgaataatacttctataatgagaatgtaatgtaacaagccttacttcaggttgccacttcttccatttctcctcaaatttcttttcctcttctctgtcaaaagcaacatatactgcgataacttgatctgccgaaagcgatttcgcatagttcaatgaattttctactacatgcgtcatacctgctacaggaacgacaattacattcccctcaattggaataagaggctcgcaagtttttaaacttaattgatcacccactgcatcataatgcttcttaattcgatggaataagaagataataactggtaagaaaataagaatcgaccaaacttgtgcaaatttagttaaaaagaacatgctcattacgataaaactaataactgcaccaattaaattaaccgttaatcttaaagcccatccttcaggcttttcgcgaagccattttaataccatccctgtttgagaaagtgtaaatggaataaatacacctactgcatatagtggaattaaatgttctgtttgcccttggaaagctacaattaaaataatcgaagcaactccaagtataataataccgtttgagtaacctaggcggtctcctctaatcgtaaacattctcggtatgaatttatcttttgcaaggttaaccgctaataaaggaaatgcagaataacctgtattagcagcaagaattaatattaaagctgttgtaccttgtatgaaatagtacatgaaattacgtccaaatgtttgttcagcaatttgagaaacaactgttacttctttactcggagtcactccgtaataataagctaaaaatacaattcctgaaaataacacagcaagtaatgcacccattgcaagcaatgtttttgcagcattgtttggcgcaggatctttaaagttcggaattgcatttgaaattgcttcaacacctgttaaagcagaactacctgatgcaaatgctcttagtaataaaaataaactaatccctgcaactggtgtaccaattggcgcatgtaaagtgggtgaaacatgaccagttaaaatattatatatgcccacaccaattaatataaatagtgctaaaacgaataaataaacaggatatgctaaaacggaagctgattccgttactccccttaaatttaatatcgtaattaatataacaaatataaccgcaataattacgttgtgtgcatgtaagctaggaaacgcagacgtaattgcatctgtaccagcagacacacttaccgcaacagttaaaatatagtcaactaataaagatcctccagcaattaagcctggattcatccctaaattttcttttgatacaacatacgctcccccgccatgcggataagcaaaaataatttgacgataagataaaataagggctgtcaataatactaataccccaacagcgatcggaatggaataccaataagcgatcgctccaacacctgctaaagcaattaaaatttgctctggaccgtaagcaactgatgacaatgcgtcagaagataaaatagctaaagctttcgttttattaagcttttgttctccaagctccgttgattttaacggtcttccaattaaaaatcttttaatagatgaaaccaatgctgtccactctccaataattttgtacgaacttttctgcttgttgcagccagtaaactatttactcagaaaacaaaaaatgtctacaagccatagcgaaatagacttgtagacattattttttttgtcgcacaagctccaccttccttctcaatataacgcttacgaggttagctgtcggattcgggcctatgagtagccctaccttttttaaggattcaccccatcggattatgtactaatccgtaaaaacgggtcccccgtaccatgcggtttcagcgatttagaaaattgaaactgtggattataatactcctttattttcaaaaagtaaacaaaaatttttaataagaaaaaaattaaaatgattgtgcataatccactgagaaatatacataatgaatactaaaaaatccgcaaaggagacccctatgtctaaagaaaagaagcctattttttccgattcatatttagatgcagtagcaaatgaaattaatcagttatatggtaaacgtgaacaggaaataaatttgacagatagaacgaaaagaaataaataatttgtcatacaaaaaaataaaaaagatagcaatacacttatatattgctatcttttttattttttcatacatctaattctattacagatctgttaaaggtcatctcttcatacacctttaaattttgatatatagtgcctaataatggtgccgctatagaaaattgctctgctacatccagtaaatatccttgcaagtgcttcccttcaataaacgaacccttctccatatcacgttgcatcgatgacttcatatcatacgaaattttatcaattgttttcatatgttcctgggcaatattaacctttattggagctcctaatactttcataatttgtacagattcctcaaatacattacggataaaatcacggccgccttcactttcacgaattggtccaattggtgcacgcattaacgttgtcacaccggacattacagtaataaataaatatttatgccacatatcttgcgtaatattttcacttaaaacaaaactagatttcgtacctgcaaatgctttagaaatatgctttactctctctgaattttgagacttaatttctccaaacacaagtctgttggcagcgctagtttgtacaatttctccttgatcgtttaacgtcgtctcgataaagcataaaccgccaagtactttttcttcgccgaattctttttgtaatagcgataaatgagcgataccatttaacaatggaatgattacagtattttcgccaacaaacggcttcaaatcttgaattgcctcgtttaagtgatacgcttttgttgaaaataaaatgacatcaaatggagaagttctctcttctttcgttattaaattcggttggaaagagaaatccccgttaacacttcggattacaagtcctctttcctctaattgttttttccgtttactacgaacaagaaatgtaacatcttctcccttttcgactaatctgccaccaaaaaatcctccgactccaccagcgcctaatactaaaatccgcatacagcatcccccttttcaaaatacaattttataacttttagtatacataacattatacatgtcctctgctaaataagctgaattttcactctcaatcgagtataaaacagtggttattttcaaataaatttgggcatgttgtttctatagcatatatggaaaggaaacaatgtagatggaggcaatacaagcaattgaggaaaaagatgtagcaacagctatatttcaatttatattcccgttttcgtttaaagctggatatgaacaaaatatgttccctttcttacaaaaaaacgatttccgtccttttcggctcgatcatctctatgatgaaaatacatattatggggagtttaaagtttcacatcaaaatatggaagcatactatctttcatttacaaataaaattctctttcctcactcagagcatcaaaagggcttgcaacgttattcaaaggaccttaacttaactggacatttaacaacaaaccttatttcaatcccattcaagatacactctattgatgtaacactttgtccttatgaacttggcttcttaacaattcgaacagaagtaaacactgctccaagcatgactttatctgaagcaatcgaattcgctgctcgcttccgtgtacttgaaactaaaaatgatacaaatgagactatttgtattggatgtaacggaaaaaagtattcccaagttgaaaaattcatttttggttatttatttcatggcgtaactgatttctttgaaaagaagagattaagaagttcatactttcaaaccttccctttcttcgaagaccaaagaatgtacgtccaaactttattgtcactaaaagaaggtatggaacttaatgaagtggatgtttatcgtacttctagtctttccggattaacaagtgatggtaagccatatgtgagtgcaaataaccttccttacattcatgactatttaaaaaaacacgcttaccagagatgggctccaaatcgttatttcataatggaagaacatatttttacatgtgtaacaaatgaaggagaacgcgaaatcgctaaacttgctagtcaaatgtacggagaattttattacgctttattattaaacctattccataaaattgttttattaaaaatggcaaacgcctatgctgagctaaacattgaacaagatactaatgaaatagagaaattaatttattcgatcaattcgttcactgctaattatttttctttagaattagtatcccaatcacaaagtgaagatattttctttcgtttaagaaaactttttaatattgaggttctatactcgaacgcgaaacaaaatcttgatagtttgtttaaatatcaagaaaatgtcgcctctaaaaaagatagcctcttattattaattttaacgctctactctgtagtgggccaaatgttagggtttactatgattgaccttttaagaaacaccgattcaaacaaaatatcgtcacctcttgaatttttcgctctattaattgcgattagcggcattgtcatttcacttattttaggagctcaaagtttataccaatggggtttacagcataaacgaagaaaagcttgggtaaaacaaactgtactttctgccgttaaagagaaagaagataaaaattaaagaaggttattttcaaattcttggcgcgctgcagtaagtgaaatctttatcagcgattttccgattatatcggcgcaactcgaaatatatcagcgatttttaagatatatcagcgcaactcaaaatatatcagcgatttttaagatatatcagcgcaactcaaaatatatcagcgatttttaagatatatcagcgcaactcaaaatatatcagcgatttttaagatatatcagcgcaactcaaaatatatcagcgatttttaagatatatcagcgcaactcaaaatatatcagcgatttttttaatatatcgacttaccgacaaaaaccgacaaatgacagaaccgtataataaaaaaagggtgctccaaaattaaacttggagtaccccttttactataagaattcagtttacttccctgcttcgatttgctctaatgcagcagctacttgctcttccgttaattcatgttgtattacgtagcggttacgtggacttacacgacattcattagaacatgcacgtaaatatttcgcttcgttttcttcagaacataaaattttcttattacattctggatttgaacagtttacatagcgctcacaaggttcacctgtaaagtggtctttaccaacgataacatgttctttttggtttactggtacagcgatacgctcatcgaacacgtaacattgtccatcccaaagctcaccttgtacttctgggtcttttccgtacgttacaattccgccgtgaagctgacttacatcttcatagccttcacgaactaaccaaccagaaaacttctcacaacgaattccgcctgtacaataagttaaaatctttttaccttcaagtacttctttgttttcacgaatccaatctggtaattcacggaaggattcgatatcaggtttaatcgcacctttgaagtgacctaaatcaaattcataatcatttcgtgcatcaatgataactgtatcttcttgtttcattgcttcataaaaatcttttggctctaaatacttcccagttatttcgtgcgggttaatgtcatcttctagacgaagtgtaactaactctggacgaggacgcacgtgcattttcttgaatgcatgaccatcagcttcatctattttaaatacgataccgtcaaaacgtggatcattgttcattgcttccatgtatttctctgtttgctctacagttccagaacaagttccgttaataccttcttttgctacaagaattcttccttttaattcaagtgaattacaaaatgctaaatgctctgccgcgaattcttctgggttttcaattgttgtgtacatgtaatatagtaatactctgtatggttttgtagttgccaatgtatttctaccacctatctaattttttaaatcatgtataagttaacgttcatatcaaaacatatataataagaaaatgaatcccattttcttttctttatactattttctatcagttaacaaaaataaaaaacaagattacacaccaaaacactatggttatgttgtaatcccaatatattatatatcatacaaatgcaattccatcaattaatatgctgtattatcagctttatgttcacataaatttcaaaaacagccctttaattcactatgtttccccacgtcatcacaccataaactcccaattcattttacgttatcacaccatccattgcataaaggcatataatttgcattaaggaaactttcgtgttcaaatgaaattaccatataatatatttaaatgtattgaaataatgagtaagaataaatacaataatttcatcaagttaacattttaaaggggaaaactactatgaataaagatataacaaaagatgaacatctcccttctgaaagtacaactgtacaatcagctcacttagctttaagtggagaaacaaaaggctggaaaagactgttaccatttttaggacccgcttttatcgcgtccgttgcttatattgatcctggcaactttgctacaaatatcgcagctggttcacaatatggatatttactattatgggttatactcgcttctaacttaatggctgtattaatccaaactttatcagctaaattaggaattgctacaggaaacaatttacccgaaatagctcgtgaaaactttccaaagcctgtgtctatcggcttatggatacaaggtgaactagttattatggctacagatttagcggaatttattggagctgctttggggctttacttactatttggaatcccgatgctacctgccgctttaattactgcagccggatcatttattattcttgagtttcaacgtagaggatttcgtccactagaagctattattacaggaatgattttcattgtagtaattgcttttgggattcaagttttttatgcaaaaccagaattaagtccccttctttcaggactatttattccaaaattccaaggtgtagacagtatattacttgcagcagggattttaggtgcaacagttatgccacatgcaatatacttgcattctgcattaacacaacgccgcgtggtcggaacaactgacgaacaaaagaaaaagatttttcgtttcgaatttatcgatattattattgcaatggttattgctggagcaattaatgcaagtatgttaattgttgctgctgcactattctttaaaaacggcttgcacgttgaagatttagatgttgcttacactcaatttaccaatttagtaggtcctgtatcggctgcattatttgggattggacttttatcagcaggactatctagctcttctgtcggtacaatgtcgggtgatattattatgcaaggtttcattcgcatgcatattccgttatacttacgccgatttattacaatgattccaccattagttattatcgctttaggtgtaaatccaacttacgctctagtcatgagccaagtcgtcttatcattcggtattgcatttgcgctagtaccacttattatgtttacaagtaacaaaaagattatgggtgcactcgttaaccaccgtataacaacatttatcgcttggataattgcagcactcgttatcattttaaatatcttcttactgtatcaaacatttgtaggataatgaaaaagggtattccaattttaatttggaatacccttttttcattatttgtattaatcctataaagtctttttaaaataaattttataatctatttccagccaataacttccttacaccttgaataatctttattttcagattaaattatataataacaaatacattctattttcatgtgaaaaggagcgaaaatatgtttcctttattaaaaactgaaagactcattttaagagaacttaccaaagaagatgcaccgcgtatactacaatgcttttctaatactaatgtactgcgctattatggccaaaaaccgttacaagatattgatcaagtgaagcaaatcattcataattttaagttgagttacaatgcaagaagcggtataaaatggggaatcgaattaaaagacacgaaagaactcattggtaccattggttttcacgattggtcttctgagcataaacgagccaatataagttatgcctttttgcctgaacactggggaaaaggatatgcgactgaagctgtttctgagattatatcatacggtttccatacgattcatttaaagcggattggagcaattgtatttcttgaaaatgaagcttccaatcaagtactattaaaattaggctttgaaaaagaaggcgttctaaaaaattatatgtatcaagatgatgtcccatatgatacgaatttttacgctttattgaaatcggtttaatagaattcatgtgtaaaaaaccttacttttaaaaagtaaggttttttgtatttattcattagcaatataagcattcttataagtataaataccaccaaattgatgcttttcaattccttttacataatccttttgtacatatgctgagccaatatgataaagcggcgctaccgcagcatcttctaataatacctgctcggcttctcgcaacgcttcccatcggttttccgtatctagtacaaaatccgttttcgctttctttattaattcatcgtaatgaacattagaataattcattttattattcggattccctgtcgtaaataactctaaataactaattgggtctttatagtcaggtccccaatttgccatagttatatcgtaatcacctgtttgttctaactgtaatttttgcttaaatggctgttgtttaatttgtatcgcgattccttgcaaattcttttctaaatcaccttttatatattctgccatccgttttgcattatcttgttcaaacgttaaaaactcgaggtttacttgctctacttcaagctcttttttcgcttctttccaaatcttttgcgcattttgcaaatcatatgaagaaagatctccgttttcttttctaaaatctttaccggtcacttcatttacatgaccaactggtacaagcccgcttgcaggttttgctccgttattaataaagtgagcaacaaaatcatctttatttaacgctaatgaaatagattgacgcacctttttatttgctaacgcggtatttttttcattaaaacgaagcatggcaattccaggatcactcgacatatgtaattccttattccctctatacttgtctacaatttgcgaattaataggtactcgatccaaatctccggcttcatataaatttacagctgtcattgtatcctttacgatatgaaagtttatttcgtctaatttcactttcttttgatcccaatatgtagcattcttctttaattgaaactcttgttcatgcttccatttttctaatacaaatggcccgttatatatgagattactaggttccaatgcataattgtttccttgttctttcaaaaatgattcatgctgtggtaagtatataggtagtgctaacaactgtaaaaaatacggaaccggctgttcgagttcaacttctaacgtataattatttattgctttaaccccaagtgcatcaagaggcattgttcccttattgatctctttcgcatttttcacataaaagagcatggacgcatattgagatgctgtttcagggttaattgcacgtttccacgcaaatataaaatcatttgctgttacactatccccatttgaccattttgcatctttacgcaagtcaaatgtatatttcttaccatcttcacttcttttaaacgattttgctatggctggagtagactgatcttgatcatttaatacatataacccctcaaatatattctgcataacgtgggctgatgtaccatccattgttttcgcagtgtccagagaaggaatttcttctgatactgttacatttaacacttgttttttaacctctgtatcacttttattcgctttattattacaagctgttaataataaaaatgtaacaagtgccattaccattaaatggctcttttttcgcttcatgagttgttctccttaaatataaaatattataaagcgtaatatattatagcagaaatactaacagaaagatgcgacattcttttgaatatttattcgttcaagaaaaaagctatcctttaaaaggatagctttttcaactgccacataattatctatctttgcaaacctcgtttataacgacttgcttcaaatataatacgctcttcatctaacgttttacattcgccattccaaacgacatgttttccgttaataattacatcgcttatatcttttccactagcagcatatacaaggtgtgataacacttcatccgctggttgtaaatgaggcttattagacggatcaattgtaatgaaatcagcacattttccaatctcaagtgatcctgtttgtttcatcccgattacttcagcagctccttttgtcgcaagtgtaagagctgtttcaactggtaaagctgttgcatcttggtgaatacctttttgtagtaaagtcgctatgcgcatttcttcaaacatatctaaattattgttagatgcaacactatctgttgcaattcctacttttattcctgcttctagcatcgcttttacattcgctataccagaacctagttttaaattactattcggattatgagctactcgaacgtcattttctgctaaaaatgcacgctcatcttcatttaatactacaccgtgtgcaataactgttgggcgtttaaacaatccgcagctcgctgcatattctactggacgttttccatattgtgcttcaatatcacgtacttcacgctctgtttcagaaagatggatatgaaccatcgtttgattctctactgcaatccgtgcgcactcttctaacaattctgtactacatgtatatggactatgtggtgcaaccatcgtagttaacatgccactttcgttatagtaacgcttcacatatttctcagcttcttcaatcgctttcttttcatcgtctttcgttccgaagctaaataaagtccttgaaacagcagctcgcatcccgctccttgataccgtttccataattgcgtcttgatctactccaattggattaaacatgtcagagaatgatgttgtaccacttttcaccatctcaagtaatcctaattccgtactagcgaccgcaatttggggagtaaattgactttccagtggccaaattctcgtctcaagccacggctgtaataacatatcatcgccaatacctcttaggagactcattacaacgtgtgtatgtgtatttacaagccctggtaaaacccactttcctttcatatcaattacttcatctacttcaaaatcattagcgaattctccgctctttacatctataatttgatcattttctacaatgatatatccattttctatcacttcgttttgttcattcatcgttacaattgtagcgtttacataagttgttttcaaaagtatttcccctttcaactctatgaagttccctttaataagttaccaccattatagtaacttattaaagattaagagtcaaaagataatttgaattctttcgttactttttccttcaaaatgctatattgtttttcatttgtatctgcaaatgcttctttccgatttgattccacatccatataattcaatttcccattgaattgagtctctgtaaaatcaaatctctgcccatctataaagttataaaagtgccatacctctcttacttttgtctttttaatttctcctccatatatgtcttgaacgactagagccgttacaccacactgtccctttgctgggttttcaattgtccactttgaactcgtttcaatcgaccacgattttattagtgcttcatatattcttttttcctttacatcatccattctaatcttcccctactattaatagttttacacatcatatttcaaaagaggcagtacacgacccttaaagacagttgatggtgtctctcctattaactgtgcccccattttcaagtaatatccttttgcattcggatcactatcaatcgtaaaactttttaatcctagttcattggctttttctattacgtactcccaaagtattttcccgtaaccttttcctttgtaatcaggatgaatgtacaagaaatcgagagctttatcattacgtaaaaatgagaaaaaaccaatcttcgcattatcgttttctaaaacatatacaaaattattttttatgtattcttctgtaattgttaaatcttccttacaagcaagtatgaattcttcactataatcccacgttgcttttgattgtagtgcgaattcacttaattcatttgcttcacttaataacgcttctcttatcttcatgattctttctcctcaccttcgatatgtaaactactaaattgattcggaaagcacttcaaaaaacctttttttcataaattagaggttatttttataaatctttattataaccagtacaatttttttaaagaaaaagaacaccatccctaaaagttggtgttctctttttctaaaatttaatcttcaaactcactcattcgttttactatttcgtacgatacaaacctatacagtttctactaccgcttcaaccattgttccatttttagcataattcgtatgccaagaaaaagctttttctaaaatatgaggagtttgtccacctcttgtttttgcttcttcgtaataagcacgtagttgatcacgatacattggatgtgcgcaattctcaataataagttccactctttctcttggcgcaagtccccttaagtcggcatacccctgttcagtaacaataacatctacatcatgttcagtatggtctacatgagaaacgaaaggaacaatacttgaaatgttaccacctttcgcaatcgatttagtaacaaagatagctaggcgtgcatttcttgcaaaatcaccagacccaccaattccattcatcatttttgtacctaaaacgtgagtagagttaacatttccgtatatatctaattctaatgcagtattaattgagattaatccaaggcgacgaatgatttcaggatgattggaaatctcttgcggacgcatcattaatttgtcacgatatttttcaaagttagaaaatacttgttgcattttctcttcagaaagcgtgatagaacaacaagaagcaaaattgacttttccagcatccataagatcaaaaactgcatcttgtaaaacttcagaatacacttctaaatcttcaaattctgaatctaacattccatgcaatactgcgttagcaactgaaccaattcctgattgtaacggcgctaaacgatttgttaatcgccctattttaacttcttctcgaaggaattctattaaatgctgtgccataatgaccgtttcttcatccggaggaacaattgtcgatggcgaatccaattgattcgtaaacacaattccctttactttttcaggatcaattggaataccgattgttccaattcggtcatctgttttcacaagcggaattggaagcctctccccttgtttacctggttcatatagatcatgtagtccctctaattgcgtggattgagccatattcatttcaataataatagacttagcatttaaggaaaacgctaaggaatttccaattgaagtggttggaataatcattccgtcctctgtaatcgcaaccgcttccaaaatagcgaaatctatatccagaacgtcagcgcggagtaactctgctgtatgagataagtgttgatccacaaataaaaagtctccgttattaattccttttcgcatcgtcgcgtcagcttggaaaggtaatcttttccctaaaattcctgcctcagcaaataatttgtctacatccgagcctaaagaagccccagtataaacatttactttaaaagattcatcattcttaactcggtttacaagcgcaaatgggactgcttttacatcacctgcacgtgtaaacccacttaagcctaaagtcattccactttgaatccaggaagctgcttcttcaggtgtaactacccgatcttttagacgttgatctctgattctatctaaattattctccatatgtaatccctctctcattgaatattcataattattttacacatttacactatcaaaatagggattttagtatacaatgccgaaaattcagacagaacagcaaatttaggttctaaagcagaaaaatttagaatcctagaagcttacggaaataactagcgtatgattgactaactggtactctctcaccattatccatcgaaagtacaaaagtagaatgggtatcaggataaatcgctttaatatgattaacatttacaataaatgaacggtgacatctaataaatgaatctttaggaagcaagtattcgaattcttgcagagagtatttatgtgttcctgataactcttctgaattcacgtacgtctttttatctttagcctctaaatacataacctttgaaaaaggaaccggaatccagccatctgttgtttttaaagtaacgactgactttccatccgttaaagctggataaattgccgttacgcacccttcaagctttccattgtttgaaaatggtacagccattccatgataaggaataccaaaaacatcccgattcataaactcagatgttttttgattcatcaccatcgctttatgagcaatcgttccttcctttatagaatccccagcgctaatctttaaatcaattcgtttacttggccgatagtaaatatattctttcgtattcgaaacagcaattgaaatttcatctgaaaataattcaccaacaacatctagtaataaacctaatgttctatcttccattctattaacacctcattcactattatactactattatgaacgagcatctgttgctttataaaaagtttgattttaaattatttttaaaattagttttattcactattacttcgttactacaaaaagcctcacttcagaaaagtgaggtttcctctcatacaatatttctttattttttaacgactatagaataagatttattttttattaagtaaagtgaatttaagaatttattgcccgtatttctgtaaaataaataatcccaaactacaaacagtttgggattatctttctcatttattatgcgcatctaaccaagaaattaaatctttaaatacttcatccttatttacttcatgaaacatttcatgtctaccattttcatataaacgtagtgtcacgtctttcacaccacattttttatagttttcatatacttcttttacacctttccccatatcgccaacaggatcacgatcaccagaaaatatatgtattggaagattctttggcgtcttcttgtattcttctagtttatttacttctaatacaccagaaaataattctcggtaaaaactcgtcgtacaaatgaaaccacataacggatccgcaatatatttatcaacttgattattatctgaagataaccaatcaaattttgtacgatttggcttaaagttcgaattgaagtttccgaaagataaaaagtttagcattggacttttcgtttttgcaccacgcaatttcatttcgattgttgctactttatgaccaatagctcctaaaagccctggatttccacctgttcctgaaatcagaaatccatcatataattcgcctctaagttgcacagcacgtcttgataaaaaagaacccatactatggccaagtaaaaataacgggcatgtctgctcttttcttaccgtttctgatacaaaaataacatcagacacagcctcattccaacctacatttggtttaaaatgaccataatcttcttctcttttcactgttttcccatgacctttatgatcatgtgcataaacaccataccctgcttctaataacgcagcaataaagtctgtataaacacctgcatgttctgtcataccatgtgcaatttgaataatccctttcggtttaccttctggcaaccacttgcgtaaataaatttctgatccatccaatgccgtaacgaaactttcctgtacgttcatttcgtcagctcccaactctattatgtatctttaaaaatgaatatcgattcatttttcttactatgtattatatgcaattgccttcattatgacaaatgactaccttttccaattagctcaataactattatgttgacgaatcgaaaataaaattatatagttacttacataaagtaactgtataatttttaggaggtttctactattatgatgccatcattatttttagcacatggttcgcctatgctcgctattcaagatacagactatacacgatttttaaaaacacttggagaaacatataaaccgaaagcaattgtcattttcactgctcactgggaaagtgaagtattaacgatttcctcatcagataacgagtatgaaacaatttatgattttggaggttttccccctgagttatacgaaatcaaatatcgtgcgaaaggctcttctagcattgcatctatgttagaaacaaaatttaagaacaaaggtatttcagtccatcataatatgacgagaggtttagatcatggttcatggacactcctgcaccgcatgtatccagaagcaaatattcctgtcgtgcaaatatcagtcaatccattcctttctgcaaaagaacaatttgaaattggagaagcacttaaaggactcggacaagaagatattttagtaatcgggagtggtgttaccgtccataacttacgagctttgaaatggaatcaaactacacctgaaaaatgggcaattgaatttgatgattggattattaaacatatgcagcataacgataaagatgcattgtttaattgggagaaaaatgctcctcatgcacaattagcagtaccaagagcagaacattttgttcctttatttatcgctatgggaagtggtgaaaatagcggtgaagtcattcaccgtagttatgagcttggtacattaagctatctatgtcttaaattttaaagaaaaggatgaagcaatcattgcttcaccctttttttattcactaagttaactaacttccaaatgttgtttctctgatacctcttcgttcttattatgaaaataaacccagatacacgcaataaatagtagtgatgatgtagagaggaaaacatattggaagcctgcatgtgctgcaatttgccccccgagcactggaccaatcatatttcctaaaaactgaaatgattgattatatccaaatatccgtcccgtaacatgggttggtgtatgttgttttagtagagtttgtacggaaggtaataatcctgcttgtgcgatacctaataaaaatcgaagaattaataggtgccaagctgaggttacaaatgcttgcgggataaaaataattcctgcagcaaataacgctacaactaacgttttttgaggaccgatatgatctgataatcttcctagtcttggtgctgccaaaataacggctaatcctgttgctgacataactgctcccgcaattgtttcaatatgtgcagtatgaggacctactaaatttttcacgtacaatgtaacaattggttgaactgacatattagcaagttgaataataaatgttgttacaaataaactaataattaaatgcttcgctgggaccatcgtccatacttttttcggctgtgttttttttgcttgagcagagtgattttcttcatgcaagaagaaaaaaacgatgagaaaggaaaggaataaaaaagctcctgtaacaagaaagacatgacgcattccaattaactcagacaaatatccaccaagtaatggaccaagtaaagaaccgctcacgccaccagttgaaattgtagaaattgcccaacctgaatgttctttcggagtttctgctgcaataaatgtcattgcggttgaaaggaaaccagatactgctcccattaaaaatcttagtgcgactaattgatatacatccgttacaaaccccataagcgtcataataatcgccataccgaggctagcacgaataagcatcagtttccgtccatgtatatcaccaagctttccccatattggcgatacgatcgcacccattaaaaatgttacaccaaatgcaagtcccgaccactgtgcaatacttgaagtgccagttactcctaattcctcaatataaaaagataagaaaggaattactaaactcataccggctgcagtggtaaaacaacctagccaacaaatcattaaatttcgtttccagctggccattttcacaccttctttctttagatacccattctacaccctttcttgtaaaaagtttagtaatttgctttttatgcaagatttactacaaaacccgctattttctagtaaaaaccactacatctctacatcattttcataataaaaccaactcctctatatgaagttggttacttattatctatcggtattaaacgagcattacaatttctctcgtaaaactcaatgggacctgcttgtccaataatcgcatattcatatccatcttgcttcatattatataaacaatgatacaataattcttttcctacacctttcacacgattttgtttcgctatgcccattggaccaaacaatcctttctttcctctcactacatcgtaacaggcgaaaccaactattacttcctcctgctgtgcaatatagataggtaacttttcattatatgtccgatatccgtaatcaaccgactgtaaccaccgttcaccaaattcagccgccacaaatcgtgataacttatcaaaatcagaaggactagctcttcttacatgacaaaataatgtattataaatagatttaaaactatttaaatcaaccgctaagtctctcggtgcagctgtaatacgtaatatatctttttgcatttgtgtatgtataaattcaccaatatctgtatctacacgaaataatgcatacataacatgtccttcattgattactacttgctgaaagcgttccatacgtttcttcgctatttgtaaaatttctatcgccttataagatagtttatattgtcctatttttttatactcttgatgatgtaaatcgaatcgttttcgtaacgaaagtttttctaaaaaatctggaccgactttatgaaacaaatacataaataactcagcgcaaactcctgtaccttctttacacatacctatgaacagatggactggttgaattatgttatactcactctcttctgctgcaatctccaatattttatgcacacgttttgtaaattgaaattcctccatatgtgtttccaccctctactaatttactaacaaaccgtaaccataaataattgaaacaattacacctactaccaatatacctggaagtaaatttgccaccttgattttaataatactaagcaagttcaatccaatagcagatatcataatgccgcccgtagccgtcatctccactataaattggttcattaattcttccgggacaaaactattaatttgtgttgcaaaaactgcaataccaccttcatataaaacaactggaatcgccgaaaatactacgccaattcctagagttgtcgttaatataatagaaataaatccatcgataattgccttggtaaataaaatattatgatttccgcgaatcccactgtcaagtgcaccaagtatccccatcgcaccaattgcaaaaattaaagtagctgttacaaaaccttctgatatgcttcctttccccttcgatccaactttattttctagccaatcccctaaattttttaacttttcttctaattgtaaccactctccaattaccgtaccaatcactaaactcagtatgacaacaagaaagttttcactttttaatgccatttgaagcccaagcacagtaaccgctaaaccgattgcgtgcattatcgtccctttcatactttctggaatcctactaaataatttaccaagtaaagtaccaaatataatacaaattccatttacaactgctcctaatataaccatttctcattcttcacccttcgaattctttatttctatattttggtttatacattgatttacaggttatctatatgttaacttaatattgagaatattaacaaatgttttccactacataacccgctgtttttttgtaactttaattacctttaatagattcagtgttaatttaattgcgggataatattaaaagggaaggtatatatgaaaactttactaaaacgatttttgttaatagcctttttcattacaccgattgttttattaatcaattactcttttatttcaaaagcaaaagacaaacccgatttacaaaacaaatctagtaaaaccgcttcaaaaagcgaaaagaaaatagaagaccaagaaatcacactcaccttctctggtgatacaatgtttgattggcaattacgtcctataatcgaaaagaatggggctgattacccattccaacatgtaaaagaagaaataaaaaaagctgatatttcttttgtgaatttagaatcggcatttacaacgaaagaaaagaaagcacctgggcaactcttttggattaaaagtgatccatctacactacaagctattaaaaacactggatatgacatcgtaaatattgggaataaccacacacttgattatgggcaagatggattattagatacgatttctcacgtagaaaaattaaagttcccttacattggagccggaaaaaatgcgaaagatacatatacagcacgagaaatgaccgtaaaagggaaaaagtttaaatttctttccttcgttcgatttatgcctgattctaattgggtagctggtgagaataaacctggcgttgcgaatggctatgatttaaatcttgtaacaaaaacaattaaagaacaaaaacaagatgcagactatttaatcgtctatatgcattggggcgttgaaaaatcaaaccgtccggtagaataccaaaagcaatatgtacctaaaatggttgaagcaggagctaacgcgattgtcggaagccatccacattggttacaagggtttgagtattataataaagttcctatcgcttactcattaggtaactttttattcccaagttatgtgaatggaaaaagcgccgaaactggcgtattaactttaacttttaaaggaaaggatgtccaaatgtcattcaatccttatatcattcgcaacaaccaagtttcccctgtaaatgaggaagaaaagaaaaaagctcttcaatatttacaaacaatttcaactgatgtagaaattgatgatacagggaaaataaaaaataaacgaaactagacagctcaagatctatttctctgtaatctactttacagaataggtgataaacatgctgaaaaacttattagaaaatgtaagtttgttagaaaatatttataaaatgtctatagccgttctacttttatgttcagttttttctgttagatttctaaaaaaaataaaacgcgaacgaaaacttactacctttgaatttactatgtatgtaattattcgcattgcgatatttttttggttaactagctttattcttcttgaatttaatgagtatctagtttaactataaaaaagatagaacaagcactatatttctttgcttgtatctatcttttttatttagatgcttattcttcccttctattaaataagcaaatcaaacaaaacagggtttttattaagctccataaattgaatattattttctttaaagcgagtaattaattgctcataatcttctttatgttttaactctactccgactaatgctggaccattttccttattatgtttcttaatatactcaaaacgagtaatatcatcttctggccccaatcctttatcaagaaattctcttaacgcgcctgaacgctgtgggaattcaatgatgaaataatgctttaacccttcgtaaatgagagatcgttctttcatttcttgcattctatcaatgtcattatttccaccacttagcgtacatacaactgttttaccttttatttcatccctgtataaatcaagtgctgcaatagagagtgcaccagccggttcagctacaatcgcatttttcttatacagttctaaaatcgtcgtacaaactttcccctctggtactaaaacgatgtcatcaattacatctttacaagtttcaaaagttaactttcctacctttttaaccgctgccccatcaacaaaactatctattttctctaatgcgacattatcattttgaagaaaagcctctttcatagaggcagctcccatcggttctacaccaataacctttgtagtaggactaacaccttttacatatgtaccaacacctgatgctaatccaccaccgccgattgccgtaaagatataatcaaccggtttctccatatcatgcataatttcaactgccactgtcccttgaccagcaactacatacggatcatcaaacggatgaacaaatgtcattctattttcttcacaataacactgtgcttcttggaaagagctatcgaatgtatcaccaactaatacaatctctgcgaaatcaccaccgaaaaattgtacttgtgatactttttgtttcggtgttgttgtgggcataaatattttcgacggaatcttcaataaattacatgtataagcaactccttgcgcatgattaccagcacttgcacaaacaacaccgttttgtaacttttctttcggtaaactttgaatcaaattgtatgcaccacgaattttgaaagagcgaattaattgtaaatcttctcgttttacataaacgtcacaatcatatttctcagataaaactgtatcacgttgtaacggtgttttaataacgatatctttcatgcaattatgagccattaagatatcttcaattttcactctctcctttaccttttgcaccattatatatcatccttatctcttttaaattggctcaatcaaaatgtgggattttcagaacagcccctgtattcgccgatgttaccatttgtgcataacgtccaagccagccagttttcactttcggttctggtcgtttccattcttttttacgcttatctaattcttcattactcactcttacttctagcaagcgttcttcaacatcaatacatacaatatccccttgttcaagaagtgcgattgttccaccagctgctgcttctggtgaaatatgtcctactgaaattccacgtgaagctccagagaaacgtccatccgttaataatgcaacctcagcacctaatcccattccagcaattgctgatgttggtgctaacatttctggcataccagggccacctcttggtccttcgtaacgaatgacaactacatctccttttttcactttcccaagcataatgccagcaagtgcctcatcttgtgaattaaaaataacgcaaggtccttcaaaacgctttacctctgttgcaccgcttttaataaccgctccatctttcgcaaggttgccttttaatatacgcaatcctccttcctcactatgagggttttcaagagagtgaataacttccttatctttaatctctgcctcagcaatattttctcttaatgtttgcccagtagcagttattcgatcaagatgaagtactccttctttccggctcatctctttcaaaattgcactaatcccgcccgcacgatcaatatcttccatatgccaattggaagcagggcttactttacataaatgtggtacacgtcttgaaacggcatcaatacggttcatatcgtaatctaatccagcctcttgcgcgagcgccaatgtatgcaacactgtatttgttgaaccgcccatcgccatatcaagcgcaaacgcatcatcaattgcttcttccgttacaatgtctcttggtttaatatctctttcaattaaaattttcaatttctctgctgcttgtttaattaactcttcacgtcttggatcaattgctaaaatactcccgttaccaggaagagctaaacctaacacttcacataaacaattcatagagttcgcggtaaacatacccgaacaagagccacaagatggacagccatgatcttcaatatcttttaattcttcttctgaaattttcccagattgataagctcctactccttcaaaaacggaactcagatcaacaacttctcctttagatgtttttcctgctgccattgggccgcctgaaacaaacacagtcggaatattaatacgtagtgcagccatcatcatacctggtgtaattttgtcacagtttggaatacaaatcatgccgtcaaaccagtgtgcatttacaaccgtttctactgaatctgcaattatttcacgactcggaagagaataacgcataccgatatgtcccatcgcaataccatcgtcaactccaattgtattgaattcgaatggtaccatacctgcctcacgaactgcctcttttacaagtttcccaaactcgttcaagtgtttatgccctggaataatttcaataaaagaattacaaatcgctatgaaaggtttatcaaaatcttcatctttcaaaccagttgcttttaataaactacggtgcggcgctttatcaaaaccttttttaatcatgtcacttctcatcttgtcaaatcccctcttacatatttttcatttatactctcttactctatttctttactaattctttcggtgcatgaatccaactcatcatttcacgaagctctgctcccactttttctaattgatgattttgttctgcttttttcattgcgttatacgtcggacgccctgcttgattttctaaaatccatttcttcgcaaattcaccttgctgaatttctgtcagaacacgcttcatttccttcttcgtttcatctgtaacaattctcgatcctgttacataatctccaaattctgccgtatctgaaatagaatggcgcatattcgttaatccaccttcgtacattaagtcaacaattagctttaattcatgcaaacattcaaagtatgcaatttcaggacgatatccaccttccgttaacgtttcgaacccggccttcacaagtgcagttaccccgccgcaaagtacagcttgctcaccgaataaatccgtttcggtttcttcttggaatgtcgtttcaattacacccgcacgtgtacaacctacaccttttgcatacgctaatgctacatgtagcgctgttcccgtcgcatcttgatgcactgcgactaatgccggaacaccatttccttcttgatatacacggcgaacgagatgacctggactttttggcgcaaccattgctacatctacgtaacttggcggattaatttggccgaagtgaatgttaaatccatgtgagaaaagtaacatttgtccttcacggagattctcttctacttctgatttatatacatgtgcttgctgttcatctggcaataacatttgtacaacttgtgcggttcgaaccgcttctgaaacagacattacttcaaatccatctacttttgctacttcatacgatttaccaggtctaacaccaactacaacttccacacctgaatcacgtaaattttgtgcctgcgcatgcccttgagatccataaccaattaccgcaactgttttcccttgtaataactctacatttgcatctttctcataatacgttttcatactccatacaccccttataatttatttacttgcagtacatcaattaattttttcaactgactaacaagtaatgtcgcttcattttcagtacaaactgctgtgagtttcatttcagaaacgccactcgtatctctttcgtttaaatgtaaagaagaaatataatagccacgccgagcaaaaattccacttatacgtaataagacacttggctcgttatgaataacgagtgaaaaagtatgactcattcttcccacctcttcataatcatttcgttattccctttgtttggcggaaccatcggaaatacgttttcaccttcttctacacaaaaatcaactacgacaggaccttcgtgagcaaatgcttctaacaccacttgtttcgcctctgttgaatttgtcgcccttaatcccttcactccataagcttctgccactttcacaaaatctggtgagccaatttttgactctgataaacgattttcataaaacatttcttgccattgccttaccatccctaaaaatctgttatttataataaatacttttacagggatgttattttcagcaattgtttgtagttcttgaatgttcatttgaaaagaagcatcacctgcaatacaaacgacgagttcttcttcttttgcaagctgagcaccaattgccgctgggaacccaaaccccattgttcctaatcctccagaggtaaggaacgtccgaggttttcttgctttatagaagtgagcagcccacatttgatgctgtcctacttctgttgtgacaatcgcttcaccattcgttaattcacttactaagttgatcacatgctgtggttttaactcagattctttttgcttataagaaagtggatattcttctttccatgcctttactttctgaagccattcatctgtttgtgtataaatagacatatgtaacaacatgtgtaacgcttttttcacatcaccaacaatcggatgctctacagttacatttttatgaaactcagaaggatcaatatcaatatgtacttttttcgagtgcggagaaaaaagttctaatttccctgttacacgatcatcgaagcgaacacctaatgcaagtagtaaatcacattctgttaccgccatattagcagcgtatgtcccatgcataccaagcatccctagaaacaatggatctcccggtggatatgcaccaagtcccattaaagttgaaacgactggaatacggttctcccttgcgaattcgaagagttcatcggatccacctgaatgaatgacacctcctccaatataaagaagtggacgctttgattttgaaattgctttagccacctctctaagtttcatgctgtctggtacaagttctggtttgtaccccggaatatcaacttcttcattaaagaaactggtgacttttgcattttgaacatcttttggaatatcgattaatactggtcccggtcgtccgcttttggcgatgtaaaaagcttcttgcacaattcgtgatacatgatttacatcacgaacttggtaattatgcttcgtaacaggtactgtaattccgacaacatccgcttcttgaaatccatctttaccaattaaaggcgttgcaacttggccggtaatgacaactaaaggaatcgaatccatataagcgtctgctaagcccgtaactaaatttgtcgcccctgggccagaggtagcaaagactaccccgaccttcccagaagctctcgcatatccttcagccgcatgaatggcagcttgttcatgacgagttaaaacatgtttcaaaccactttcgtataacgcatcgtatactggtaaaatcgctccgcctggatagccgaaaacggtcgttacacccaatttcttcaaaccttgaatcacgtgcccagcgcctgtcatttcttcacactgtaacttctcatacgctgtatactgctgcttcatttcaattaactcctctccttatttatgctaagctttccgtcagcccgggaacacgtactcctctttctctcgttaattttttaaattcttcggtcaattgtttcgttacacttcctggtttcccatctccaatttctctcgaatcaacttttacaactggaattaactccgctgctgttcctgttaaaaatacttcatccgctacatatacgtcatggcgagtgaatggtctttcctcacacggaatactcagtcgttcacatagctcgataacactatttctcgtaataccttctaatgcccctaaataggatggcggggttaatacttttccatctttcacaacgaaaacattatcgccagaaccttcacaaacatatccttgttgatttaacataagagcctctaacactcctgcttgtgccgcctcaatttttacaagtacgttatttaaataattcattgacttaatacgtggatctaacgcgtctggcgtattacgtcttgatgcaacagatacaacgcttagcccattatcataaaattcttgtggaaataactttaattgttctgcaatgataattacgctcggcttcacacaacttctcggatcgagtcctaagtcaccttttcctcttgagacaattaagcgaatataagcatcagcgtattcatttttttggagtgtatgtaaaactgcttcttccatttcttctaccgtcattggaattgttagtaaaatagatttcgctgattcatacaatcgtttcacatgttcttttaaacaaaatacatttcctccgtaactacgaatcccttcaaatacaccgtctccgtataaaaaaccgtgatcatacactgaaacaactgccttttctttttctacaaattccccattcatgtaaatgtactggtttcccatctcacatcgctcctcttttttctctatttttgcaatctatttctacatcgattgctgagatgagtaattttaacagaatattcagtatataaaccttaaaaatatactcgtctcaacaatcgattacttacatacttgtagcaatccattgctgagacgagggaatcgtggtaccactcagcttccttatacttctcacgaaatataagctctgcaagtccaattagacttttgtttttctatcgggaacaaccccgctactttttactagttttcaaaagtagtgctccaaggtgattttcaatgagtgaattgttaccaccctcacagcctcggggcagctctctgaaacaatctttatcatttactctcctcttctacgcattctcttcttctatttttaaaaataaaaactctcgcctcagcaatcaactactacaatttagtagctttgattgctgaggcgagagtttcgcgttaccactcagcttccttatacttctcacgaaatataagctttgtaggtccaatcagacctccgtccttttaccggagacgatgccgccgccctctactcagtttccctttcgcaagcgatgctccgaggtgatcttcaatgattcgattgttactaccctcacagccttggagtagctctctgaaacgatcataatcatctactttcctcttctttgcatatacaacatataaagttagaaaattcttaattaacttttatttgttacacgtattataggacgttgttcttttcgttgtcaacatgttttctcaaaaaaatcaaaattcattctatttattttttctcaaatcaaaattggaatgcattacttacatacactcatatattacttaagtatgtttgcattactacataaagaaaaacttataaagtttatgaggagatgaggaaactatgttaaaagggaaagtagcgttagttacaggagcaagccgaggaattggacgagcgatcgctaaacgtttagcaaatgacggtgcattggttgctgttcattacggtaatcgaaaagatgacgctgaagaaactgttcatgaaattcgatcagatggtggccaagctttttctatcggcgcaaatttagaatccttacacggtgtagaaaacctttataacgctttagatactgaattacaaaagcgcactggtgaaacacaatttgatattttaataaacaatgctggcattggtcctggtgcttttattgaagaaacgactgaacaattttttgatagaatgttttcagtaaatgcaaaagcaccattctttatcattcaacaagcactgccacgtttacgtgacaatagccgaattattaatatttcatccgctgccacccgcatttctttacctgattttgttgcatatagtatgacgaaaggcgctattaatacaatgacttttacgctagcaaaacagcttggagcacgaggaataacggtgaatgcaatacttccaggatttattaaaacagatatgaatgcagaactcttgagcgacccgatgatgaagcagtacgctactactatttccgctttcaatcgcttaggtgaagtagaagacattgccgatactgctgcattccttgcttctccagacagccgctgggtaactggacaattaattgatgtgagcggaggatcttgtttataaaaaacatatattttcaaatcttttttattgcgcaataaaacaatttatataatactatataaaacatatacatttaggaggattacagcaatgtccgaaaaaacatacgaactcgcaaccttcgcaggcggttgcttttggtgcatggtaaaaccatttgatgaacttcctggtattcataaagtactttctggctatgcaggaggtcatgtagaaaacccaacatatgaacaagtaaaagctggaatatctggacatttagaagttgttcaaattacattcgatccttctatttttccttatcagaaattactagacttatattggccacaaatcgatccaactgatgatggcggacaattttttgaccgtggtccatcttatcgtaccgctattttttatcataacgaaacacaaaaagggcttgctgaaaaatcaaaacaagctcttacagaaagcggtatgtttaaagatccaatcgtgactgaaattcgccctgctgcacctttttacgcagcagaggaataccaccaacatttctataaaaagaatccagagaaatatgctactgagcaaaaggaatctggtcgtgaagactttattaaagaaaattggcaaaaaaaataataaaaacgcatcgtgcttttttaatacgatgcgtttttatttttgataaaagtaccatacaatgatgagaacaaccgctgttaatgcccaaagcgctacttcatttttcactctactctttttcttagtcatttcatctcctcctaatagcaatacaacgtattcaagatttcctctgtttcattgtccaccttatatacataaatacatccttaccaatccttataacaagaccaccaataattccgattgcaattgaaattactaacatctgtccaaagctaaaagaatttgtgtacgttatgtagagaacgatacatataagtaaaacatccggtaaagaaagcaaaaactttttaagcatttctttatctcctctatactttatttatatcttctactgtaattttgaaatatagtttgttcaaaaattccatttagaccctcattttatgaaaaataataagaatcccttttcaaaagagattcttattcagtagatttaagtttaattattttctacatatcctattccataattactcctaaaatagaataatattactaatcatttattgtaaattgactatttgccaggcaaccgaatgtcgcgccagctacctacatcgcattggccaaattcattattacctaccgcgactaccgtgccgtctgattttagtccgactgtatgtgcacaaccagccgctatcgctacaatatcgcgccaatcgcttacgttacattgaccatactcattccagcccactgccaccacggtaccgtctgattttagtccaattgtatgattcgtaccaactgctattgctacaatatttatccagccacttacatcacactggttatgtttatcattccccactgcgactgcttcaatatctcgccagccacttgcattacattccccttctttattccggcccactgctactaccgtgccatccgatttaaggccaacagtatgacaacgccccgccgctatcatatctttgggccatcgcttcactttttctttcgataaaaggtaatccatgttttacctccttgcatataagcaactgtatcataatagatatttttatcaaatttcattataaatctacatttacaaagaaagcttattttacttcttcaaaaaataaaaacctccagtttaaatactagaggttttctcgttatttcttcaagcggtcaataaaatcgttcaatttatctagcgatttcatattctgattgcaagctacaccatctttgcaaatgtagtttccctttttaacgaaagttcctggtacatcgcctttaatttcaactaaaaacattcctacttcttcatgcccatgacataatgaacaaatgctttttttatttaaactttggaacgttccttgcagaccaacaaatttatttttatcatttttcgctataataaatttcctgcttgatcccttatcaatccagcttaaataagatatttctttcatatccatttcttccatatcaggaagttttaacttttttgccttaggaaataacttttttaatgtttgtgctgtaacttcttgaaacggaattacatacggatttattttcattaaaaatgactctgcatcttctctattttgaactgttaataccgtatcaattaactctttctgttcatccgttaaattctcaaatacatgtattatcttttcaatcgcaagcgattttaacgcttgaattacacctctatcatttgccgttgcatgcccgtttgctaaaatataagcttgtgattttataaaattatattgatcacttctaataaacgcttccatctttatcactccatacaaattgttgatctagttttattgtatacaatgattacgttttttgatatgtaaaagataacttagaaacaaacattacatatatcacttattctctaccgctgcatttcctgacaaaagaagccatcatccgttttccattccgcatataatacgtcttcaaatttagtaattcctttttgctttatttgtttataaagccacccttcatcaaatcccgcttccctcaaattatccttaactacttttccatcactaattaatgaaattggtaagtatacaggcttatgttttaaacttaaatcatttacagtaggagattcgtatttactttttttcaaaacgcttatgtttccgttaggttccaatatcatatattcaacttctcggattgaaaatatatctttttgttgcctaagcatttgttgtaattggtttatatccaaatgatttacgcttaattgttcacgatcaatctttccattacgaataataattgaaggatatccttcaaaaaaccttcttgtccctcttactttttgtgttatcacttcaatagtataaattaaaattacccaaacaaatactgaatataaaatagaccatactttaattttaggatcatatattgaatttccaacgagctcacctaggacgattgcagaaataaaatcaaagggcgttagctgagatatttgtgttttccctaatatttttgtagcaattaatagaacaaaaaaaccaattaaaagctctatcgttatttgtccaatatgattcatatatgttcacctttctactcttcaaatgttctgtatagcatttaataaaaaaacggcacattttttctattatcatgcccgttcacacttcatatatccaatacatataaaacaaaaagagtctgattcaaagtaatatatgaatcagactcttttcctcttatttagaatacacaatctttttaatcgtttccccagaaagaaaatattcttctgcaagttgatgaatagcaatcccacttttaaacgcttctttaattgctttatttctttcatctaattgttttcttccgccagatcgtgtaccccatttataatgtttcgtttcttgtttcggaatgtaaattgtttcaccttgtatatacttttgaatttcagtaattaaactctccggtaaaacagcattagcttttacgtatttcatttctgctcgccccttattttttatggttcatttcaataaggtgcaaagccaaatataaaaaatgatacgagctcatataggcgattgtatattacttgtctacctcacgcaaagtatcgccatttccatacttggctttgcatgagacgttgcagtgtctggcaattgaattataatcgccatataaacacctcctaatataccttttgcattttattatatgataaattccttctccttgcatccacacccttcttaaagcacgaaattttatctaagaagggctatcagttcgtaacagtaaatgaattgcaaaaaagagcaaaataaaaaggtagcgtatctttgtatgatacgctacctttctttttatataatgccaagtacatttaagaatacgataataatcgcaattggtgcgatataacgaagtaagaataaccataatacgaatagtttataacctttatttttacttacacctagctctttcattaatacatctttcttcatttttaaaggaacaaagatagaaactaataatacaccaagtggcattaatacgttacttactgcatagtccgctaaatcaaagactgtcttcccgaaaatcttcagatcacttaatataccgaatgataatgctgatggtaccccaacaacgaagattaataaccctacgattaaggccattttttcacgtttccctttaccttttgatgttaacgatgcgacactaatttctaacatcgaaattgctgatgtaatcgtagcgaagaagaataataataagaaaacgatgaagaataattttccgaatgccattttactgaaaatagctggcaatacgataaataatagtcccggtccttgagatggttccattccaaatgcgaacacaactgggaaaattgcaagtcctgcaagtaatgtaataacaagagttaaggctacgatagaaaatgctgaacgtggtaagctttcttctttcggtaagtatgagctatacgttaccataacggctaccccaacagataatgagaagaacgattgccccattgcgtataaaataacttctgatgttacatgtgagaaatcaggttgtaagaagaaacgaactccttctccagcaccatctaacgtaagtgcacgaacgattgatacaaagaataaaacgaatagtgctggcatgaaatatttatttactttttcaacaccattttgtacacctttacttacgataaaaatagtaataaggatgaataatagctgtgatccaactgctaaatatggattggaaatgatttcaccaaacgtagcttcgtatgctccatttccttcccatagtctacctgtaatcgcattccataaatataataaaatccagcctcctacaacactgtagaaagaaagtaatatgaaacatgttacaattcctaatttacctaaccaaggccataacgttttaggagcaatctctctatatgcatcaacagcctctttttgtgtacttcttccaataacaaattcagctaataatagcggtaaaccaattaataatgtgaaaccgatgaaaattaggaagaacgctccgcctcctccaatgccggccatatatgggaatttccaaatcgccccaagaccaattgccgaacctgctgcagctaatacgaaacctaatttcgatgtccattgctgtgaattcatttgttaatctcctctctatctctttttctttgttacaattcggtatttatattgttctatcaatacttttttctaatacgttcacttcctccctaataataaaaaaacgcccctacgtaaatacgtagggacgacaaaaatatcgcggtaccaccctagttgtgaagaacactaagaaaccacctaaataaaaacgcccctacgcaaaaacgtagggacgataaaatatcgcggtaccaccctagttatgaagccacaccaaagttaggacctaaataaaaaacgtccctacgtaaatacgtagggacgataaatatcgcggtaccaccctagttgtgaaaaaatcttcaccactttatttgataacggtataaactaccgtctttcatttcctcaaaatatgagatttatgaaagatgctccaggacgaacttcatgaataatctatatactgattcacaccaaccatcagctctctgaaatagggagatattcactactataccctttcattgcccaaatattattttccgaattgattactatcatttttatcacacattaaaaatagtgtcaacttatatttcgaatttttatgtattacaatctatttaaaaattcgaaatataagttttagtttagaaaacaagtagcttagtacataacgaattctaacaggcaatagaaaaagaattacgtattattgatacttattcaataatacaaatcatctagaaacataacctgtctctctgtattcattttttaagagtttgatggataccaagaaaatttcgcatcactatccagtggtctatttttcgtttcttctttaattacacgaaaccattcatttagaatttgagttttgggcaattgagcagcaaggctatcttcccaaattacatgtgagaaccaggctttcgtttcccattcaaactgcaattgtgcgaacgaaattatagggtgatcagctccacgaaattgctcatttactgcatttgaaacttctggagcttgcggtaacaactcgttctgaattctatttcttatcgtctcattttctagctgatcccagaaatacaattgcccatttatttgataaaaaatatcaaatgaagcctcacctttcttcaaattcaataacacgaaggcacgttccacatcattgtcagccgcttttacagcattaacaattatattttgtgccattgatacccagtaactagtcgcttcctctaccggtgattcaacatacaattcttcacttaattcatgaagagtagcttcttgctcatttactttttcaacttttttaaaaaacctattaaaaaaacccataacttcccccttattactattttctatttcacaaaataaaaaatagatttttcttgctcatccacatttactcctggcgcgtatgtatgaacttgttgcaacacttcttctattagcaactctaactcctgcacacttttttctggattccctattaatgtgtccgccatacgttcatataatttttcaggtttaatagtcattcgttccacattattaggcatccatttaaacgctggatgatgtacgtacattttattcaaaccaaataaaacaccgaatacgttcctttgtacttcgcaaataacgtcataaagcataagccaatctttccgttttaaaagcgcctttcgattgtgccaacgattacttaaccatagattttctgaaatcatcagttttgctagttcatctggatatgccgctactttttcttttaattcattcgctttcccttctccatacaaactaacaccatcatgaatggatgatacaatacattgtttttcataatttatatcatattgatccaccacatccgaaattactttctctactgtctctgttaaaaagttactaatctctaatttaattccctctttcgttaaatacgtttccgaccattcttcttcctcatacggatgatacgataatattttcccatcaatatgataaataggggccctacgatcctcatcttccggcggtgttgaccataaaatatgtaattctatatctgaatgttcatcttcaagctttctagctactgaacccgctaaaataatagcttctactttcggattttgcctataaatctctgacatctctatcgctctctcttttaatcccatttcatttccccctaaaattgcagtaatcccctatatttcatttatctatttcgatattacagcttgcattaccttttcaaattcctacttaatcatatttctatccaatagcgctgaataacttcaccagtacgagaagaaactacttcattttctaacacacctccaaccttttgaatcgttttagcagaaccgatattggatttatcgcaagttattaatactttctgcaatcctaatttttgcgcttcagctaatgcaagttgtagttgtttcgtagcgtaaccgtggcgacgtttattcggatggacactatatccaatatgaccgctttcccgtaataattctggatttaatctatgtctaatattcaaaaaacctataagttcccctttttcaaaacttaaaaactgactagatggcactcgattagctagtaaattttctcctagttcttgtttactcactttttcaaaccattcatcaagagaatcaaagttttgtaaagaactacttccatgtggttgttcccctgagtgtaaaaacgcttgtctatacgccgtaatacgctcactatattcatggattggttttaatagtttcattgttcttctccccctcttcattccataaaacaaacaccttaatagcagctattcactattaaggtgtttctatcctttttattcaaataaccccatgctcaaataacgttcacctgtatcaggcgcaatacataaaacttttttaccaacgcctagacgtttcgctatcatgattgcagcgtaaacagatgctccagaagatggcccaactaataatccttcttgtctagctaagtttctcattgtcgttaaagcctcttcgtctgcaatttgaataatttcgttatacacttctgtatttaagtttttcggaataaatcctgggcttgttcctactagtttatgaggacctggtacaccaccggataaaacgggagatcctttcggttccactactgcaatatataagtttggcaatttctcttttaacgtttcaccagcccctgtaatcgttccgcctgttcctgccgttgcaacaaaagcatcaagctctccctccatttgttcgtaaatttcaagtgcagtcgtataacggtgaatattcggattagctggattttcaaattgttgcgggataaaactattcggtatttgtttttgcagttctaacgccttcgcaattgctcctggcattctttgttctgctggtgttaaaactacttctgccccgtatgctttcaataaattaatacgctcttttgacatattgtctggcataattaaaatcgctttataccctttagctgctgcgttcatcgctaaaccaattcctgtattcccgcttgtcggttcaataattgtatcccctggtttaatgagaccattttcttctgcaacgtgaagtaaattataagcagcacggtctttcacactacgtgatggattaaacatttctagtttcacatacacgtccgctgcgtcttccggaataaatttagataatcggacgacaggtgtatctcctattaattctgttacgttttcacataatttcatagtgcatcccctattctatcgttttcttatcacttggtaataaccatgaagtaagtccaattaacggtaaacaactacataatatcataatgaactgaaggctatatatatcagctaactttcctagtactacagcacctagagcaccaaggccgaacgcaagacctacaattagacctgataccatccctacttttcccggaacaagctcttgcgcgtatacaacaattacactaaaactacttgaactaataaaaccgatacataaaaataaaggtacgacccacacaagtgagacatgtggtaataacagcgcaagtggcgctgaacctaacattgaaaatacgatgatgtttttcttaccaaatcgatctgctaacggtcccccgaagaaagtgcctaacacaccagcaatcataaatgcgaatacgaaatactgggcattttttatagataaaccataatgctcaattaagtaaaattgatagaaattcccgataccggcaccgtaccaagagcgcacaaaagtaagaaaaacaagaagtataataacaaatttaatgtgtgtacttacaattgcattttccgcctcaagcgcagctctcttcttccttcttacagcgccggttgctaattcatttttgtaccaattcgatacgaaaattaataatgcaattcctactgctgcaaatgctgtaaaacctaatgaaccaatttgaccgagtggaacgaaaattagcgctgtaaaaataggagctaaagaattccccgtgtttcccccaacttgataaatcgcttgcgctaaccctcgttttgcacctgccgccatatacgcaacacgagcgccttctggatgaaagactgcggaacctaagccaataaataaaacagaaataataacaataataaagtttggtgcaaacgcgagtccaatcattccaagcatacttgaaaacataccgagtggtaataaaaatggtgacggcttcttatctgaatacataccaaacaccggttgcataatcgatgacgtcatatttaacgcaaacgcaatccaccctacttgcatataggataaattcatcgttttttccaaaataggaaacaacgccggcacaactgcttgcatcgaatcatttaaaaaatgtccgaaactaatcgcaaataatattcgatatattgtcggtgtttctactgtgtttttttgtgaaactgcctgcatatgtgaatcgctcctttctgtacaaaatatatatttattacagtaggtgtaataaattctgacttttgaaacatttctattctatactgctttcatttctttttccagaaatataacttaactcccatcattgacttgcatccttgtaactttcagcagtaaaacattatagaaaaaggcaacccaatcacaaactgggttgcctcttacattaaattgcaaaacgcttatacttctcataatcgctcgtcttacattccacttctagtttcgtaccttcattttcataactcgttgataaaacgtgcgcatgattattgaaatacgaaactacctgtccgtgatcatacggaattaacatttcacatttcgtatattctttataaatatgggaacgaatcatttctacaagctcttcaattccaacatgtttcttcgcagataaatacacgcggtcttcttgtactttcggaatttcaacatccaccatatctgatttgttataagcatagatcgttggaatattttctactccaattttctttaacgtttcatttgtaatatcaattaattgttcataatttggatttgcgtaatctacgacgtgaataagtaaatctgcttccgctacttcttctaacgttgaacggaacgccttcacaagatgatgtggtaatttacttacaaatccaactgtatctgttaataaaaatgatttattatctggcaaatcaatatttcgtacagatgtttctaacgtcgcaaataacatatctttttcaaatacttgtttttcttctgtaccattataaatttcaagcattgcattcatcgtcgttgactttcctgcattcgtataacctactaatgctacaacaggtatttcatttttcttacgttgctttcgctgcgtttgacgctgggcaacgagcgcttctaaatctttattcaaaactgaaatttgttcttcaattttacgacggtctaactctagcttcttctcaccgacacctttatttttcgtaccaacgccgccgctctgtctccctaacgattcacgaagaccaattaaacgaggcatcatgtactgaaggtgtgctacttctacttgcagctgtgcttctttcgttttcgcacgttgcgcaaaaatatctaaaattaaaatggtacgatcaatcaccttacaatctaaatcctcttctaaatttcgaatttgtgaaggagataattcatcattaaagatgaccatattcgcatctatttcttgtacatacgctgctacttcttcaatctttccttttccgatataatgcgatggatttactcgttgtaaattttgcgttacttgcccaattacctctacatcacaagcttccgcaagatttgttaactcttccatcgaatatgcaaaatcatcttcattacctacatttactccaactaaaactgctctttgtaatacttcttccatatatttattcctccatttcgattacgtaaaataaaaaacacaggtcgctgcctgtgttttcgtaaacggataagggttcaccaaagaaatagaagaaagctatgctttcatcctattttatagtcaaaaagtcccaagatcgtatacgtatacacaataagcgttcacctatacaatcccattctatttataaaggcaaaacaaaaagagggcgtattcgtccctccctctttttcacatataagcttaataaagggttcctttaaaataggcagaccaatcccgttcactctgtacacagacagagcctttgagcgctattcaattattggcacaaagtattgagacgtaatctgattaagatcaaaggaagcccctccgttcattttaagttacataaagtgtagcataagtaattcgctttcacaaggtttaacaacctatatcacactaaagaaaatcgttatttttttactttaatcgtcattttttgcgagtttttctcacaataaaaataacaaaagcaattatcaattttagaaacttctcgtatattatttttacagcactcgccaaattccttcatagtaagttaagtattatcgttttaatacaacaaaaatctatattgacatttttataacctaatattagtatcaggttataaaaataaaaattaggagatgttcctatgcattctaaatctcgtattactgcaattggtacttatgttccagatcaaatattgtctaataacgatttagaaaagatggtccatacgaatgatgaatggattgtacaaagaacaggaatgaaggaaagaagaatcgctagcgaagaagaatattcctcaaacttagccattaaagcaattaaaaatttatgtacaacatataagaaaaacttagaagatgtcgactgtatcattgtcgctactactactgctgattacgttttccctagtgttgcttgccaaatacaacaatacttcaacatacctcatacactagcttttgatttaaatgcaacttgtgctggttttacatatggactacacgtcggtaatagcttaatcacttctggatcacatgaaaaaatacttgtcgtagcgacagagacattatctaaagttactgattataccgatagaacgacctgtattttattcggtgatggtgctggagctattttattagaaagagatgaagacatcccaagctttatcgctgctcacatgggaacaaacggtgatggcggcattcatctatatagcacaaacttatctactactatgaatggcacaccactgcaaacaaatgaaaaaatcgttcaaaatggaagagaagtatataaatgggcaacacgaacagtgccaaaaggcataaaaaatttattacataacgcaaatatgcaaggggatgatatagactggttcataccccacagcgctaacttacgaatgattgaatctatttgcgaaaaatctcaaattccaatacaaaaaacattaacgagcgtggaatatatggggaatacctcttcagtcaccattccactcgctctagatttagctataaaagaaggaaagttaaataatggagacacacttttactatacggattcggtggtggtcttacacatttagggcttattgtagagtggaatttaatttaagtgtataaaaagaggctctagtcagtaactagaacctctttttcatttaatttcttgccccttttcgagaccatatcacaacaggaataagtaataacgctaacacgcctccagccaatgacaatgccgcataacttgaattcgctactaccatacctgacatcgctccaccagaagctccagctagcgcaataaaaacatctattttcccttgtgttttagcacgtgtagacggtgttgtggaatcaacgatttgtgctgtaccactaatcaatccgaggttccatcctagcccaagtaaagacagagcaacgattaatagtaataaagaatcacttggcgctatcgcagctatgacacccgctgcaagtaaaatcactccaccagctatgctcattgtagttcggccaattttatcaattaacattcctgtaacgagagatggaagatacattgcacctacatgaaaacctatcacaagtcctactgcacttaaaccgtgaccgtggtgtcccatatgaactggcgtcatcgtcataatcccaaccatcacgatttgcgtaagtatcattacgattgctccaactgtaatacctcgtttattttctttcgcttcgtctgttattggttgtcctttatatgtatgttcctgtttatatctttctattatgttagcaataattaacggatctggacgaagcataacaaaaagaactagacccgccagtataaatgctgctgccgatagtatgaacggacctgcaagtttaggaactccaattgaatgcgcaaaactacccattactcctactaaatttggtcctgcaactgcaccgaaagtcgtcattaccatcgtaatactaacagccgttgctctctgcttcttatctgctaaatctgtacctgcataacgagcttgtagattcgtggctgtaccggcaccatatatgagtaaagaaataagtaaaagaataatgctattcgttaaagctgccattacaacaccaattgctccaaatccacctactataaaccctgttgcaagacctatccggcgtccatatcgttgcgaaagcttccctactatgaaagctgctaatgctgatcccaatgtaaacatagcagttggtaatcctgcaaatgcatctgttccaagcatttgctgcgcaagaagtgctcccactgtaataccagcagctagtcctgcaccgccaaacatttgtgaaatgctgacgattattaacgttcgtttgtatagtttttgttgctcttcttctgtgtacacatgattatctattaaagcccctgccttatctagcaattccccatcctccttttaaaattaatccctcttgttaatgtactatgtataacgttacatattcaatggcattttccattcatccctttcattctaaaaaactttctaatcatactcgacttatcccatgctatattaaaaatactactattcacaatatgcaaggagaaaacaatgaaaaaacaggctaatagcagcctgtttccctttacacttcttctactatccttccccttctctttttactcaaagctcttccttcccaaaacaacaaacttacgaaagcacaaattaaaataattggcacacttgctttatataaatctgtaaaactcattgccatctgattcttggcataatgattcacatcattcgaaaatgtgagtacctctttctttatactttcctcttgtttttcaacttcttttgttacttgcctcataacttcttctctttttacatccctatattctactggaacttttcttaatatttcatccgtcttgtcgcgaatcaattcttcctttttctctttacttaatcccattgtcattgcattttgtttcttatttatattcgactctaaactttgattctctattttttctttagtcatttgtaaaatttcagtttgctcagtactattcacatgaatattccgcaccttttcttctgcataatgatatactttttctttatttatagttaaattatgagttaagttagagacaaatattgcgaccgccaatacaattccaacctgtcgtaacattgatacaacactttgagaagcagttaataattctccttcaaacgaagacgcacttaaaactgtaattggccccactactaagccatatccgacacctaatatcatacatggaataataatttctatatttgttgaatgaacatcaatcatttgcaaccaatagtaggaaagccccataacaagaaatcctgacaaaataatagttacttttccgagttttttaattaaagttgctgcaactggtgagacaaaaaatatcatcgctgaaataggtgtcactaaaaaagccgcttcaatttccgttcgaccttgtagtttcgtcaagaacgttggaagcaatacagtaactccaattaaaaataaattactcaatataacaacgattgacgctccgacaaacattcgatcttgaaataactttaaattcaccattgggttatgaatctttcgttctactaaaataaatagaataagagaaatagtgctaattgcataacaagacaaagcaatattactttgccatccccatgtattaccttttactaatatgagagtaaatgaaaaaattgctgtgctacttaatagtagtcctatccaatctatttttgagataatacgttcttcattttttatttgtagcatgatgcaacataacacgattcctattatacaaaccggaacattaacgaagaacacccatctccatcctaaattttgcgtaataattccacctattactggccccatagcagctgacaatccttgtgttactcctaaaattgcaagtgcaacatgccttttagctaacggcatagctgatacaccaattaccatacttgttggaaataaaattgctgccccaatactttgtataaaacgagaaaaaataagaaaatcacctgtattagcaaaagcgcaaagtaccgatccacccccaaaaatcaccagaccaagaatatacatctttgcttttccaaagatatcagctatccgccctaacggaatggcaagtactgcaatcgtcattgtataaacatttaatacccaagacatcttttctaatgaagtatttacactcgattgtattgccggtaaagctatattcataattgtcgtatcaatcatacaaagaaagatacctagacacattaaaaagacaatcttaataccctttgattgctccatctttatatacccctttatttattgtgaatgcgtttttcactcttctgttttattgttttctttcgcctctaactcttctaattttttcttcaaagtctccacttgtgcactatacgatgcaatacctacatctagtgaaatttcttcgacgaaagtaatacctattctccacttttcatatttcaatcgaagatctgcaatgtacgcttcttttctttcaatttcatctttaatccatttttttattgttacatcatcactatagttgccaaaatacattctcattaaaaaatccgaacgtaaaacatccttctctataggcgtctgcatgtattgataaaattcttcacgcccctcatctgtaataaagtacattttcttattcggttttccctcttgcatgacaacctctttttttattttcccttcattctccaattgccgtaatgttggataaatcattccaaaacttccatcaaaaaaatgagtaaatacgtcttcaaacacaattttaatatcgtaaccagacaattccttttccattaataaacctaaaacaacatctcttcccttcaaagtaaaacccccacatagtatataatcaataatcatattaacattgttaatatgattattgattatataccttattctgttaattgtaaaatgtttctaaataaaaaagccccataatttggtttcaccaattcacagggccattttcttatttactctttaacacctacaccttgcaaaacttcaatatcctctttcatttcataataataagaaggcaattctataccatgttctaagaaataatcctcaatgaatgaaataataatttttaacgttttcacacgagcatacaatttatcgttactttcaataatatgccactttgcatttggcttacttgttttttcaaacatgtcttccattgcttcaacatactcatcccatttttcacgattacgccaatcttcgtctgtaattttccatcttttcaaaggatttttctctctatctttaaatctctttaactgttcctctttacttatatggtagaagaacttccctattatgtaatggtcatctgttagtagtttttcaaaatcattaatctcatcatatgctctcatccactcttcctttgtagcaaatccttcaacacgctcaactaacacacgaccgtaccatgagcgatcaaaaatggtgatttgcccgtactgtggaattttgcgccagaaacgttgcaaataatggtaacgtttctcatgaggtgcaggcgctccaattggatttacttggaacccacgcgggtcaagatgttccgtcacccgcttaattgccccacctttaccagccgcatcccatccttccataacaagcataaccgcgattttttcttctttcaaaatttgctgtaatgctaataagcgcctttgatatttttctaatttcttattgtacttagattttgattcaatttttttcgttaagtctactttagcaagatgtccattttccataaaacaaatcccccttgttgtatgacaatgttattttaacatatttttggtaattttttcatatcctaaaaaaactgtgtagaaacatctctacacagcttccttctctaatttcacatatataagcacatttaactacattaaaataaataatttatactgaactcttagtatattctttttattaaaacgtaaaaatagtccttttaaaaagggcagcaatctaagtatagaaaaacaaatttattcttttttactacatacgtaattatgccggctataagagtattgaataagatattgattcactactcttatagccactttacattatatggtatatttactcgtaaaaagaagataataacaagtaaatccattaaagaatgggagctctaaaaaaatgaaacgaaaaatattaactctctttacacttttatgcttagcactaccaatacaagctagtgcttacacatttcagtcactaccgattgcgtcaaagtctaaacaatggtatgtcgaaattgataaatctcataactcaaacaagcaagcaatccagccaaagcaaggtgtatttgatacgtatagtttactcgtaaaaaacatcggtcatgatgtatcaaacgtatctgtggaaatacttgataacaaccctacctctaaagctacctttaaacctactacacctaatgaaaatatttctaaaagtcatacaagctttgactacatggtattcccattagactttaatagtcataattttaaagttgtaatcacttgggaagaaaagaatttctcttacaatggccatccggtaaatgaaggtaaaaaaatgaaacaaacatttgtatttaatgaagactaagtcctaatttctttagggcttagtcttcttttttgaaacctgcttgtatcgcttccgtcacttcttttgtgatttctaattttgttgtgccaaatatgtacggacagtttttcattacaaaggtgttttattaatactagttgattatatgctaagttattttctatataggtctagccctcttttcccatataatcaattaaatcgacgaatactctgtacagacaatgctattccaattgttaaaattactaaactagctagtgttataatagttatttcgccacctatgacagtagctaaccagcctacaactacataccctaatggcaataaagcaaaagaacccaacatatcaaggcttgccactcttccgaatgcttcttctggtacaaactcctgtaaactcgtttcccaaatgagtccaaatatcatcatgccaaatccttcaattgccattaagaatattaaagcgggtgcccaagaaatgaatggcataattaataaagcaatgccactcattaaaacacctccataagccagtaatcctctcttatgccaccgctctttcccaccaaatattactgcggcaattatagccccaccaccagaaaaggccatgccaagcccatacacgtaagcttcaaaatgatgatgaacattaaataaccatggaattaatacgacgataatgccggcataacaaatatttataaaagaaaaaactaaaattgtaatccacagccacggatgactttttaaaactaaaacaccttccataaactcttgtttgtaagtaagcttactcttttcaatgggttttacttttttaaacttaatttcttttaaaaataataaacataaaaatgataataagtacgttgctgcatctagtccgaaacctatccctgcagatgcaaccgatacgattaacccaccaagtgctggcccaatcaatcgtataccttgattactcatttgagtgagtgcgttagctgcattacgaatttcaggaacgaatactttcgcccttacagcagaatatgctggttggaatatcccttccataagtccgtatatggcaacgagaatatataaaatcgtaattgttaataaatccataaatataagcgatgcaagtaatagcattaatatacagcggattatatccgtaaataacattaatttaacccgatcaattcggtctacaactaaacctgcaaacggtaaagcaagaatattaggtagcatgtacattgccatcgtcatccccattacaactgttgagccagttaatgaatacacaacaactggaagtatgaccatagttatcgaactacctaaggccgagagtaattgtccaatccataaaaacttaaagtgcgttgatactttaactggtaataataattttccaatataacttaaacttttctccttttgtatttccccttgcatgtctctctcctcttttcaaatgactatagaatacataatatacgactgaaaattcataatattatatttccaattatataagaaaccattatgttatggtaaaattatcaaaaaaatataaaggagaatgcatcattatgcctccaaattcacataacatcgaacaccaaatctatacaatgtgtatgatccagcgcaacaatgaagttttactcgtaaaacgacccaatcatcgaggtttccctggctacatagctcctggcggcaaagtagattttcccgaaagtatcgttcaagccgctataagggaagtaaaagaagaaaccggattacttgtttcggatttaaattttaagggattagatgaatatgtaaatccgaaagggaatgttcggtacatggtatttaactactggacagactcatttgaaggtgaacttcttttaaacccacctgagggcaaattattatggataccaatcgatacagcactaaagcttcctatgcaagattggtttaaagaaagattcccattattttttgaaaaaggcacctttgaaattcaacgtgtttgggataatgagctagataaacaagttgctataacaattacacatacgtaaaaaagcttggaatctctccaagcttttcttacttctcctgtactttcttaatcttataatcaatttctaaaaacttaactccaaatatccacattctatgattagcttctagtatgtgatccgtgcgctcttttataataaaagtctctgctaacggtaaacggattgtcaagaaccgagtatgtaaataaatcccctcatctccctgaccattttctcttaacttactagtaataattaaatcatgactatcattatatagtttcaaaataccagtcatattcgaataaggtaaaggtaaggcgatattcatatatgtctcactcttatttgtatgctttgaataaagagctacaaaaatagatttacctgcttcattttttcttagccaagcccttacattctctcttccatctttctcatctatgacactaatgatagagccatgcatcgtttcccaattgccgcccattcctaaatgtatttgttctacacgcttactcattttctcatagcaaagtgcgaacggacggaaccaacgagcccatttaatattcgattgcaattcatactctactgtattttcataaaaatgaataatacttaaaggaaccttcgtcacatcaaatgcctcactatgaaagtcatttactttatcaactaaaccgttgtattccttactgtctactaaattgctgctatataaataagcctcaccaattgccacatttcctcttaacttactcattggtttcccatagtatttataattcggaacactcttttcaatcacccagccgataaatgccggtaacgctactccaattccgttgacaacaccatgaatccaaaccatttgagcaattgtaatcgtcaagacatgcttcaaattcccgtatgaatatataagtgagaacataattgtaaccatgagtgtactagacgaaacgattagaagaatctttgcactgatagcattaaattttgctctccaaacgtaaaatccatacccataaattgcacataaatataggaacactgcaaaaaattcaaatattcttgagtatgtaattcctattgcaactgtcataggtgaaatcatgatgataaacataatagcatcatacactttacttctcttttctctttttctccctattaaaccagctgataatggcaatagaaacgccgaataatgaaaatgtgcagctgtgagtaaaacaatgtcagagctaaaatgcataattgaaagttttgctactgaagcagaaaaccaaaaaccacctaaaaacaaataaataaacgcactatctatggcgatctcttctaacggcttccatcctctttctagcaatctacttacaccaaataacgcaacaattcctgtatatacaaaccaaactagcgcaaataaatagtgatttgtgacgaaagctaacattgcacaaattgctgcgattggatataaaaatgatacggatttataaaataataattgcgatccatctctttttcttttatcaataatacaaaatgacattggtataaataataaaacagataataatataattgcttcaacaggatttatattcgaccactcacttattagaaaaacaacatagcaagcaagcccaaatattatatttttcatatcgtctattccctttccacaaatgttcccttatatgaaaaaagcgaaccaattaacgggtttcgtacttgtacatgaattcgaaaacattgtagtgtttcatcataactttcaacaatttttgcctcaccatacaaaaattttggtaacggcatttttcttccaaacatataaaaccattgtttctttgaagaaatatgcattgcccctaactcatcgatatgaaaatgcagtgtagaaacgagtaaatgtggttcaccaaaataatctacaatttcattttcgttttcatcaaactgcataactgcattaaaatatcttttcttatttcacctattgattccccttctccaactatttcaagcccaaatccaatctttgttttatacaaaaacttctgtggttccccttcttttttctctaaatacgaaatttcagtaaagcgagcatcccactctgtatgtatatctggttcttgcgtatattcccataatttttccatcgtcgtgttcatttttgtcgcaacataaataggctgtttccttttcattctccccacctcctatgcactataactttaatgtacatgcaatgaatttattttgctacatttttcacaaacttcctcagaaaaaagaaagaatttttaaaatatatataaaacacttgattccacgaaaaatttaaattattataaaacaaatgttaccaacaacttcataaatcaaacactctcgcctaaaacgtgagatagaggttgcgatacttatgagtattctaatggagacacagagatgtctatgaacttagatgaaaggaagtattgccgaaattgataaatttctctgcatttatcaattggggctgttttcgaatagaaacagaactgtcatatgtacagacgtgtacgtatgaagagctatctacaaaaaagagatatcatttttttatgatattccttttttggcggtttttttattagctccgttttctgtttcccttttcctgtaacagcaccatcctcacttatttgagatggtgttttttgtttgtctttctggtaactacaggagtattggggatttatatatttcctaatctattcttaaaaatagacgaaagaaggaatttgtaatggaaacaattgttcaaaaatttggtggcacttctgtcggaagcgtcgaacgcattcaacatgtagcaaatttaattattgaagaatatgaacgaggtcatagcattgtctctgtcgtttcagcaatgggaaaaagcacagatgaacttgtcgcactcgctaacgctatcacagaaaatccaagtaaacgtgaaatggatatgcttctatctacaggagaacaagtaactatttcattattaacaatggcactgcaagcaaaaggctatcatgcaatttcattaacagggtggcaagcaggtattacgacagaatctgtacatagtagtgcacggattactgacattcatacagatcgtattcaatcttatcttgctgaaggtacgattgttatcgtagctggtttccaaggtataagtgtagaaaatgaaattacaacgcttggccgtggtggctctgatacgactgctgtcgcattagctgctgcacttaaagcaaaaaaatgtgatatttatacggatgtgacaggtgtatatacgacggacccacgagttgtaaaagatgcttacaaattagacgaaatttcttatgacgaaatgttagagcttgctaatctcggtgctggcgtattacacccgcgcgctgttgagtttgctaaaaatcataatgtagttttagaagttcgctcaagtatggaacaagaaaacggaacaattgtaaaaggagaatgtaacatggaacaacaatcaatcgttaaaggtattgcatttgaggataacattacacgtgtcacaattaaaggattagaacaaggctcgctttcaacagttttctctacattagcagcagcacacattaatgtagatatcatcattcaaagtattacaaatgaaggaactgtacacctctccttctccattcattcgaatgatttaagagaaactttagaagttttggaacaaaatcaagaaactcttcactatgaatctgtagaacatgaaaatcacttagcaaaagtatcaatcgtaggatctggcatggtatctaacccaggtgtcgctgcaaatatgttcactactttaaaagaagaagatattcatattaaaatggtaagtacatcagaaattaaagtgtctgtcgttattgaccgccttcatttagtaacaggcgttgaggcgctgcatcaatcatttatggcgaaaattgagcctttagtgcaaatgagctaatctgatatatttagtaatgctaaaaaaatcatattaatgtattaccttcctattaaataaaaagctgttcgttaacacgatgctatatgacatattaaaaaacaccttgtcacattttcctatactgtgacaaggtgtttttgactgaaaggaatttgtaactacttagtagtataattatgaggataattaaataatagacttttatacataaggagataagactatggcaaaaaacaaattactacgaatggacaatgtcagcatcgttgtagaatcccttgataacgcaatctctttctttgaggagattggcttgaatctcgaaggtcgagccaatgtcgaaggtgaatgggctggtcgcgtaactggactcggttctcagtgcgtagagatcgctatgatggtcactccagatggccacagccgaattgaactttcgcgatttctcaccccacctactatatcagataaccgaaatgctcctgtaaacgccctcggttatctacgcgtcatgttcaccgttgaagacattgacgaaatggtatcgagactcactaagcatggtgcagagctcgttggtgaagtagttcagtatgagaactcgtatcgtctctgctacattcgtggagtcgaaggaattttaatcggtttagcggaagaactcggtaataaataagtaatattttataagaagtctttactaaagtaaaaatatttgaaagaaattctcgcttcataaaacttagattttgaaccccgtcctagctttagaacggggttatgcttgtttgaactttttaacacactatcaacatcctaaaatcattataaaacaattcaattacttcttatactctttcctaggaaatataactgattcttctcacctcttatcatatatatcttttcttttaaaaaacgatctgaactcattcaaaataactttcttcacgtcagagtaaaaaactatcatgaatagtgctattcctaataagatttcttgcattccttcataatcaacgaaagcacttaaaattagcaaaccacatccaatataaaaaccaaattcatttcctttctcaaaatcctcatcttctgcatcactatgtattttctttttgaaatcttgattcccttttatcaactcatctagcgtaacattatacatttcgctcagtaaaattaaattatcaatatcaggataacttttatcattttcccatttatatatcgcttgcctcgttacaccaatctttttagcaacatcctcttgtgaaaatccctttgactctcgtagtttttttaactgttctcctaaattcataacgtcccctcctttaacaaattattacataaaaagagatataaaagaaagaaaccattagtaaaattcactgtaaaccattcgtttacacaataaaaagagaggataactctttgagctactggtattatcccctataggtagaaagtaaaaaaagagtccatctgatatgatggactcaatactgttttatctggaggggaaaatgtacatatttattcaagcgttaatgtacatatttaagttagcatttatagacggtgtagaagatacaattcaaaaaaagaaaatagcatataaagttcaagattatgatggggaaaacttgcgattatttaatgagacgtcatttaatacaattaagtatgtgaagcaaagttaaagttatgaaggactaggtttaaatggcctagtccttcattaaagtgcgagtatgtaaataatatgttatctttcgttctgtttacttagtatcatgttattctttaatagagtaataaatggagttttgcattaaatatatgaggttggttacaaatgataaagaaatttactagattagtattaatagtggttatcccaatcagtcttattacaggttctggggctgctgaaaaaactgaagcacaaaagccgaaagcggtacaaacggagaaaaaggactatatggattactcatatggtagcaaaggtatattagtaagtggcaaagcgaaagaacggcaacaatacgagattggatatatggatgataataagttaattgggattgacgaaaatattgaagactgcattattttagataataaagatgaagcaggtctcatttggaagcaaatagagcgtggatctattattgaagtgcaatacggtaaggatcgcaatgatatcgtaggcgtgcaattcgtaggagatcgtgagtcatatgaaattagtgataagtttgatcggaatacgataaatgagattgttgaaaacgttaaagggaatttgtaatagatgtatttcgatagtataggatctcttattatgaaattgtatgccagttatttgtctaagtttaaattgattattttgacggtatttgtaattagttgtaaaataatgtttgttgacgaattttataaaaagtatgttagatgaaattcatctgtagggatgacatataaatattttcttaatgagtataaaatatgataatttaaatatataaataaaaaagaaaatgtattggaagtacatagtagattcatatttttaaaaattaatgtaacaataaagggaggttgagatacatacacggtgggagtgtgtatgtatttattataataatgaataagacaatcaaacaacaagtaatcgcactatcaacaagtctagtgattttagggagcgtacctttatcagcatcagcagaagagataaacaaatctcaaactgatcaacttaatattgcccaaggagaacacggaacgagcggattaaattattctaatttcaagttggaagttcctgatcatgtacaaattaacgaagcagaagtatctgaaaatgaaaaaatgcttttagaagaatataagcataaacatgatgaaacagaagaattaaacaaaatgcaaaatgctaagaagggacaagtagcagaaaaggaagctatttcaaacattgaaaaggcatttgaatctgtagatggtcgaaatgatggatctgatcgtcaaatgaaacctgttgcaaagccaagaggtattcaatatagtgcacagagtacgaagaaatatggaacacttgcaggagttccatttgtggagtggattgttccagcaggaaatcctgatattcgtcctgcaaatccgatgaaagcacgttacattacaattcatgagaccgcaaatacagccgctggtgctaatgctgaaaatcatgcgaaatatttatacaagcaagcaactgaaggcactttccgaacagcttcatggcattttactgtagacgataaacaaatttatcaacacttaccaacaaacgaaaatggttggcatgcaggagatggagatggatcaggaaacagggagtctatcggtatcgagatcgcggttaaccaagatggtgattacaataaagctttagaaaatgcaaaacgacttgcaggttatttaatgaacaaagaaggaattggtgcagatcatatttacaagcatcaacaatggagcgggaaaaaatgtcctgacattttaatttcacgtggtaattgggctggtttcgtacaaggaattcagtggtatgcaaatataaatgcgcagattgatacgcctttacaagataaaaatgactcatttaatccaaatgaaaataatccagctgaacctagcatggaactagtggtaaatggtagtggtatcaatgtacgtagtgatgcgggtattgaacatcgtgttgtacgtaaagcttcaaacggagatcgttacaaagtattagcggttaaaaatggttggtataaagtaggtaatggagaatggattttctatgacccaagttggattaaaattaactacaatgtaccaaaggaagaagtacaaaagccaaaggaagaagtacaaaaaccaaaagatgatattacaggtggctggtttgaagggcatattcgtaaattaaacagtctaggtattatgcaaggcgaaggtaatggtgtatttgcgccatatcgaaatgtaacgagagcggagtttgcgaaattaatctcgaatgctcttaaactaccagagggaaataagtcatttgtagatattaatgaggcacatccatcacttcatgacggtattaaacgttgtgcaagtgtaggaattattaatggtcgtggtgaagggatttttgatcctaactcaccaattactcgtgaagaagtatctattatgattgacaaagcattacgatataaaggaattacaggtgagttagtagcattaccatttacagataagcatttaataacatacaaagaatcggttcaacgattatacagtctaaaggtagttaatggtattggaaataatgagtttgatccccgaggtacagcaactcgtggtcaggcagctgcctttattgtgaagatgttagattcaatgcaaaaataaaatgaaactttaatcagtgagggccactcgcattgcaatcgagcagtttattcaccgaattttgaaatgagagttgtactgtccgcaaatagcagaataaatggtatgtagaagctgacattggtagaagtaaaaaataagaagaatttgaaaggagctatccaaaataataatttggaatagctcctatttagtaggaagaacaaattgtatttcatagattgtaatgtagaatgcccttccaagccccttataagcccctaccaagtaataaatcactaagaaaaaacaaaaacaaaaacaaaaacaaaaacaaaaacaagaacaaaacaagcgcgaaaaaatgaaaccggcgttgtagtagtaaaaaaattgtaattcgaatgccaaaaccattcccgtatgcctatctttataatgaaggattaaaattttcctatttactagcaaagagtggagggaaacatatggcggtataccgtaatgtgcaggtgaacttttggcaagatgaattcatattagatttaacgccagaggagcgttatttttacatatatttgttaactggtacgaaaacaaagcaatgtggtatttacatattaccgaagcgtgtggcagagcttgaaacaggttatagtatggagactgttgagaagttgctaaacaggtttgttgagtatggaaagattttatatgatacggaaacgaaagaggtattcataataaattggttacactataaccctatttcaaatacgaatgtggagaagtgcgtattacgtgagttaaagactataaaaagtaatgagttcatacatatatttttacgtaaatgccttgaagaagaatacaagattccattattattgcagcattttggtatgccaaaagaagaggataatagtagttcacaagtagttattgaagagaaagaagaagcggaagagatagaggtggaaactatagaagaggacgttccaaatagtgaagtttataagttttatgaacaaaatattagtagtttatccccatatattgtgaaggaattgaagaattggatacaaagactttctggagagaaagtgttagaggtacttaaaattgcgtttgaaaataataagaaaacgttagcttatgtgagggggattttgaggaattggtgtagtgaaaaattaaaggattttagtggggagaagtgcgtaatgggaagtttagagagaaggaaatgtattttgagtagtgtattttaatttacattaacttaacatagaatgtatgttcgtttttgtgaggtttatgctatactaccattaaataagggtatttttataatagataaaaagatgcggggggtacaaagtttgactactagtacatctgagttgtttcaatatattaatatgacagaagaacagaaacaattatcacaacgatatttacagacaaaagaagaagagattttaaaagatattcaactaacgacaattcgtgatcaaaaaagaagcgattttgcggagcgatttataaacgattttaggaaagtgcataaacaagatccggatttttttcgattattttaccatatactcgaggagcaattattaaatgttcttgtagtccgttttgcgcatgtcagtttttctaaaatgaagatttatttagaaaaaagtgcacttcctttggacaaacttgtagcaatcgcatgtaaatatttatccagtatttcaagttatgtgaatgaagcagatgtttttcttagagagttaacaagagagaatccgaactatatagagggacaattacatactttaccaactaaccagcaagtaacattacttcttgtaatgtttgatgtagattatgaaaagtttcgtacatatagttctttattgaatgagaggttagaagaacatacagaatttatattgaaactgctaggggaaaaggaaaaggttgaagcagttaaacggtatttaaaaggtaaagatgatagtgaagtatttataggtgggaatttaccggaacatatttggcggctattattttgtgttcataaatattcgaatgttgcgaggcgatatattgaaatattggcgaagaaaaatgtttggggttttataaactatgcaacacgttatatgtgtcacactctcggtcagtctcaaaactacaaaaaaactggtagtgtaaatagagaaacatatgaagaaattcaaagtttttgtacacagttttggatttctaaggaacgattttttgcgcatcgtctaaggcaacatgatttgaatagtgaggatttttgtaagacgtatgaatatgaattgctatgctttatgttggaggaaaatcctgaatttattcaatgtactttgcaatatgtaagtagaatgaattatctcatcgtcgcacgaacgctagctgaaaaaggatatgagctaaatagagggaaaatgcgagaagaattttttgttgctgctttgcaaattaaattgtctacagtgcggaatacatatcgtgattatttactagggaagttgtcacttgaggatatggagcaaatatttaaaaatccgaaatatagaagtatgtattggggtatgccggtgttagaggttgcgcttctttgggatatagatgatatagcgaagagggaagctgtacttacactacagtttggagatgaagatagtgttaatttatacgaacttctttacgaatgttctgtcagaggagtagaaccgaaacaagtattagaagatctgctttcgtatggattaagtaaggaaaagcttatcgcttatgcagttgaagaagctgcatgctacagtgaagagcgaaataaggcgaaggaagcgcttgtttgtgtaattgtaaaagaacaagcgtacatcattgaacgatttgatgagtattctgctgtggccaaagcatatattttagaagagttagcaaaggataacatgattaaaatgcgtccaattttaattaaaagcttaggagattcatctaaaaaaatgcgtgagtctgtagttgaactgctttcaaaagaggtagaagctgcagcagatgtagcagttgaacttcataataaaaagaaaattgttcgtgaaaatgtgatgaaaatacttatagagtataagcttgaaaaatatacgaaatttgtacaggaagctttgcaagaaagtaaaaatgaatctttcgcaggaaaattctcgtttttatttcaaacggaggaagaaaagatagaagaactatgtgcacgtattttaactgaacaaacaagaaattcacttctgcaattgattggggatgagccacaaatccgtttacgtgactctgatgaaattgctgatgctgcaattccgttagcctatttacaacagtatattttagatgctgttattgagaagaaagaaacagcagaagtaattggtagagctttaaatgaagaggacttaaaagaatatgtgcaaacaatatatcaaatatggatttctcaagacgcagatgtgaagaaacgtggaattctttcgttatacggaatgtatagtgacgacaaaatggtcgacatacttataaagcaaattgatgaatgggtgcttcaaatgagaggaaagatagcagcggatgccgttcgtgctttaggtttgtcttcatctaagcttgcacttatgtctattcatgcaatagcatttaaatataaacataagcaagtacgtaatgcaacaaaagaagcgctaagtcttgctgtgaaaacacgtggtataacagaggaagagctggcagatcaattggtgccggacctcggctttactatacatggtgaaaaaataattgatttcgggaatcgaagttttactgccattttaactacagagtcaaaaattgaattagagacagaagaaggaaaacgtatgaagtcacttccaaagccgaatgcaaaagatgatgtagaaaaggctgaagaggctaaaaaagaattagcctctttaaagaaggaactccgaaatactctttccatgcaaaaacaacgattggaaacggcactttcattaaagcgttattggtcacataatgcatggaagtctgtatttatggataatccaattatgaagcaattttctatttcactcatttggggtgagtataaggaagggaagttgctgaaggcattccgttatgcagaaggtggcgtgttctgtacaattgacgggaagagttatgaactttcatctggcactgttattggtttcgttcatccgttagaattgtctggggcggagaaggaattatggaaagagcaattagaaagtgcgggaattgttcagccgttcctacaaattgagcgtccagtgtttgtagtagaagagaatgatgagagtgctattgagagatttggcggtattttactaaatggtcgttcgttattcggtaagatgacgaagcttggatggatccgtgggtctgttcaagatggcggtgtatattatacattttacaaagaagatactcgtaccggattaggagtgcaattgtcatttagcggagcaccgattggttatgaagatgaagaagatgtatgtgtatttgacattcaattttataaagcaggtacagtgaatcgtggttcatatgaatacgatgagattgatgatgaaagacgcattgtaccaaaagaagtagataaacgcttctttagtgaaatgttatatgatgtgcaagtagcgacagattcaaatcttgggcataatgaaagttggcgtagcgaacgataagaaaaaccccttcattggtaggaaaatgaagggggtttttcaatgtttcaaaaggttctttcataatagaagcgaattagggggaagaggatttttatccttttagaagggattggtatcatgatcaaatagatgatttatcatacgactacactgaatacagcgggaatagaagggaaaatgttaacgttacagccacggtaatgatagaaaagacttttactatatgtaagagtctctttttttgtaaacgcgacaaaatttgacaaaaaaatttgtaggaacttgttataatttctgttggaatattttgtttaacgagaaatgggtgtatagcgtaaaagatttcggtgtcatacaaatacattttttgttttacattcaaggatttcataagagaagaattacaaaaatgaatgacatggagaagtcatagggggagaggagatttagcatgagtattaaagtaataagagcaacaggggtaatgggaggagcagcaagagttgctgtaaaggtagataacgaagtagtaatgaaacttgagaataacgaagaatatacgcttccttttgaattagatgaagcgaatattaaagtaaaacaattcttttttggaagtaaagaaaagaaagtaaaggatggcgatgtagtagaaattaagataaatagtattgctatgctattactgatggtgtcaatgatggctgttttatttggttcgtcaattggtataaatattgttgtttttggtgtgataggagctttagttacattagtatacggattgaataactggtttcgtttagaggttaaataattattgtatatatatttatttcagttgatttactatacatgggatgaaaatatttttaagtgggaaatggggagaatcagtatgaagaaaatggttgtaatatctagtttggcgctaatagtaggtttaacaactggttgtagcagtgaaaaaacaagtggacctaaaacagtatctgtaaaaaaagaaaaagagttagtagcgaaagatatttttaaaaaagcagctgacggattaaaacaagaggaatatcttacattgacatctcttatgtcaatgaaggggagcggccaatcagaagaaattaaaatgaaaatacaaatggagccgaaactgaagaattctagggctgaaatgaaaataagtggtacagatattgtaacgtatgaagtagatggaaaggtcgctgctcaagtgaaaacccctgatacaggagagttagttacgatacctaataatcaatttaatgtaaatgatgtaatggtcagtaaaaatttacttaatgagttagatttaccggaagctttggctaagaaaatgaaagcaaagaaagatggagacacatataaacttacacttgaattaaagggaaaagaagcggtagatacgttacaaaaaattaatggagatatgaaaaaattaacggaaggatttaatatggatgcgtttaacattgaatatataataacaaaagattataaatttgaagagatgcgaacaactataaaagtgagtgaaagtaactcagataaaaaagctagtacagataaggaaaaattggatgcagttgtgagtataaagattgattcatatgaaaagtttgattcaattaagttaccagaagggattcaataatttcaatcgtaaaaggataaaaaggagcggaaatctgctccttttttatttttcctactatttttagaagatttatatgaatatagttgaacggcacttcatttttttctggaataaatgtgaaacgttgtataaaataatcaagaaaggcaaaaattatagggggaaagttgtgaagaaaaataagagtttaataagttttttaggagtgtttattatgttgttttctttttgttttcaaggaaatgtacaggcagatgtaaatactgttcaatctggaaaaatcaaatcaggaaacgtaacagtatgggaagttggaaatgtagcgaaagtattagcggatgtggagcgcttaaatttaaatacagtaaatgtaccgattcaagtagatatcccaaatgtgacttctactaacatggtaattaatcaagcgcaaaagcaacaagctattattttaattcaagaattattaaagcgtaatattcaagttatagtggaaccgttcccatatattcagcaggggaatgttggagagacagaatggaacccaagtaacattaatgatttcttctggaattggaagacggttattctgcaagatatttttaattccattacaagtaaatacaatgtgtatggactaaagattgcttctaatttcgtgaatatggagtatgcagaaggatactggagcgatacaattgattttgttcgtaatcagtataaaggaaatgttttgtatcaaatgaactggtggttaacagcaagctgggatccttcttatgaagcgaagtttaaagagaaaatcaatcgcccgtatttaaaaaagatggatattgttagcatagacagttggtttgaagtttcaggaaaaagaaatccaacatatgaagaagtgaagcaaagtttatttgcgacaacagtatataatcgtgggcaaaatgttgttcagcaattggaacaattacataatgcaacaggaaagccagtttacttcggtggatttaacgttccagcacgtgaacttggattacaaaatccatggaatccagatgtttcaaatgtgttttcgaaagatgtacaattaaatggatggcgtgcttaccgagatgtattagaaccgaaaccatattttaaaggtttttcaatttggtttattggctctaatgatagtacacatgcgtatcaaatacatagtaaagaagcagagacagttattaacgggtggtaccgaaaataatttttataaaataggtaagttttaaagtttactacatatatttttagtgaaaggcctttcaccatcttatcacctagggggcaatcataatgaaatttttgtcttaccttacagtaattttggtgattcttggcggtttgaattggttattggtagcgttagattacaatgtagttgagaaatggtttggttctatgccggcgcttgtggacactatttattggctcattggtctttctgctatttatcaaatttttgatcggttctttacgaacgactagctattattctttcattattagagtgttaagtacgattatgtacttaacacttttttatatgtccataaaaaagtctgcacttgcaagcgattccatcgcgtcttgcgccataataatagaaaacaaattgaccgtatattatattttaggttataattcagaaagtttaaaaatatccaaataagaaatagggaggttatgagggtaatggagagagtctataatttttcagcagggccatcaatactccctttgccagttttagagaaagtgcaaaaggagcttttaaattataacgggacaggcatgtctattatggaaatgagtcatcgatcttcttattttcaaagtattatagaggaagcgagtaacttacttcgtgaattaatgagcattcctgatgagtatgatgttttatttttacaaggcggtgcgtcattacaattttctatgataccactgaacttaatgaatacgtataaaaaagctggatacgtactaactggctcatggtctaaaaaggcactgcaagaagccgaaaaagttggggaagtacaagtgattgcttcttccgagcaagagaagtttactacgattcctaaactggacggtttactaagcgatgaaaaactagattatgtacatattacaacgaataatacaattgaggggacaaaatatgtggatattccacatatagaaagagtgccgctcgttgcggatatgtcttcaaatattttgtcagaacaatatgatgtttcgaagtttggtcttatatacgcgggagcacaaaaaaatttaggaccagcgggcttaacgattgctattataaaaagagatttaattgggggagcagatcgctcttgtccgacaatgttaaattatgaaacttacagtaaaaataactccttatataatacaccgccatcctttagtatttacgtaacaaaacttgtactagagtggttgaaagagcaaggcggagtatctgcgattgaagaacaaaatagaatgaaatcttcacttatttatcattttttagatgaatctaaattgtttacttcaccagttgatcctgcgtatcgatcacttatgaacattccatttacaacaccgtcagaagaacttaacaatgagtttttacaaaaagcgaaggaacgcggccttgttacgttaaaaggacatcgctcagttggcggtatgcgtgccagtatttacaatgcgatgccagcacacggcgtaaaacgattagtagattatatgaaggaatttgagcttgagaatagatagggagatggggatatgtttcgtgttcaaacgttaaatcaaattgcagaaaaaggtttgcaagtttttactgaagaacgttatgtagtaggagatagaatcaatcatccagatggaattttgcttcgtagctactctttacatcaagaagagttttcaaaagacttaaaggcgattgcaagagctggcgctggtgtaaataatattcctgtcgagcgatgtacagaaaaaggaattgtagtatttaacacgccgggggcaaatgctaatgcagtaaaggaactcattattgccagtcttattatgtcttcacgcaacattattaatggtgtaagttggacgaaaaacttagagggtgaagaagtaccacagcttgttgaatcaggaaaaaaacaatttgttggatcagaaattgcagggaaacgtctaggtgttatcggacttggcgcaatcggtgctttagttgcgaacgatgcgttagcgttaggcatggatgttatcggatatgatccttatatttcagttgaaacagcttggcgtctttctacacatgtgcaaagagcatttagccttgatgaaatttttgcaacgtgtgattatattacactgcatattcctcttacgaatcaaacgaaggggatcattggggaacacgctgtagagaagatgaaaagagggatgcgtctatttaatttctctagaggagaacttgtagatgaaaaggttcttcaaaaagcattagaagaagatattattacacattacgtaacggatttcccgaatgaaaatgtaataaagatgaaaaatgtaacagcgacgcctcaccttggcgcatcaacgtctgaatcggaagaaaattgtgcagtaatggcggcgcgtcaattacgtgaatatttagagacaggaaatattcgtaactcagtaaattatccaaacgtagaattgccgtatatcggaaagaaacgaattacaattatgcatcaaaacgtcccgaatatggtagggcaaattacaggatgcttagcggaacatcatattaatattgccgatatgattaatcgtagtaaacattcttgggcatacacaatgattgatatcgataacggaattgatgatataataaaagagaatattgtagaaaatataagcaaaattacaggtgttgtagccgttcgaatgattgtgtaaaggagagaggaatgtggcaaaaatacgaccgtttcgggccattcgtccagtagaggaaaaagcggcacaagtggcagctttaccgtatgacgtattaaatagtgaagaggcaagggaagttgtaaaagggaatccatattctttcttgcatgttgataaagcagaaattgatttagatcctgaattgtcaccgtatgatgatcgcgtgtatgaaaaagcgggcgacaatttaaagcaatttatacgagaagaagtgttcatacaagatgaagagccagcgctatatatttatgaactgacgatgcaaggaagaacgcagtcaggccttgtcgtttgtacatctattgatgagtatgaagatgatacaattaaaaaacatgaaagaacacgtcatgaaaaagaactagatcgtattcgccacgtagatgtgtgtgacgcaaatacaggtccgatatttttaacttaccgtacaaaagatgaagtaaagcatttaattagaagctggaaagaagagcatgcgccaatttatacatttacagcagaagacggtgttaagcatgttgcgtggaagattgcagatgaagatgtaattacgactttagtaaacgcatttgaagatattcctaatctttatattgcagatgggcatcaccgttctgcatcagctgcaaaagtaggacttatgagaagagaacaatatccaaattacacaggagaagaggaatttaatttcttcttatcggttctattccctcatgatgaattatcgatttgggactataaccgagttgtgaaagatttaaacggtttatcagaagaacagtttttaaaacaaatcaagcaatacttctatgtagaagaagcacctgtttctccgtataaaccaaatgaaccaaaagcatttggaatgtatgtaaatgagaagtggtataagcttactgtgaaagaagaaacatttgatgcgaatgatcttgttagaggtttagatgtatctatcctgcaagatcatttattaagccaagtacttgaaatacatgatccgcgttctgattcacgcattgattttgttggcggaatacgggggctagaagaactagaacgccttgtgaacagcggcgaatacaaagcagcattcgcattatatccgacatctatggaagatttattagcaatcgcagatgccggagaagtcatgccgccgaaatcaacgtggtttgaaccgaaactgcgtagtgggttgtttgttcattctttaaagtaaatattgacttctatagttttgaaaaaccgaaatgatttgagtttcggtttttcttattttacaagtgtttttgaggagggggatcgatgaaattgcaagtaggcgaaaaaattacctttgaaagaacgtttacaaaagaagatgttgcgttatttacggaagtatcgaaagatgaaggtgttcatcatgttacaccagatgagcaggggagatttgttgtacaagggcttttaacatcaacactacctacaaaaattggcggtgattataacgtactagctcgcaagatggattttgaatttttacgtcctgtgtttagtggtgacacaattcgttgtgacttaaccatagaacaatttgaacccgatgaaaaaaatcgtacaaatattactgcgatgtttatatgtaggaatcaacttgaaaaggaagttatgaaggggagtttttctgggattattctttagttagtaggaaaagtaatgaataggtgggggccatgtcactcgggcttaggtttttaattccaccataacgaaaatgatatgcattgctgtatattgataatatactctgttcatttttaatttgaataagctcgtcaacaaaaaggacattccgagtattacaagaaatgtcctttctgctaaaatgtaaggtattttgctaaaattcaaactctaaaatcagtttactagtttgacctgtaaactgataattataggaccctctcagattttctaagttaccggtagctttaataattgttcctggggaatctaaatttcctttatcaaatattccttgctctatagctgtgaatgtcccttgttgccccttataaattccttcaaagtgtaaaaatccagaaattttagccgtagccaagtgaccatcatttatatttgagtctagataatataataagtattcaacaaaagcttttccttttaattctccatcaatatcatattcaacatgggcaatattaatagggaaatcttttctagtatcatcaattagtttttcatcccatttacttactgtaaatgttacttccatacacgtaaatccccctttatcattagataagtaatctccatatcatttaaaaagtactaattcacagtcatatcttataggagtgtttttatttatttgagccctgtcatatcgttatcttatctcagaatcacctgcgcctccccatgaaggacttactgttgtcacggtgtctcctgcttgtaacctctttggttttattaacatgttaactccgctgctacagaatgtaatggattacgattatacaaactgtatcattgaaatacatgatgtatgacattagtttcttcatcatcaatccgtttacctgctgggattcaagaattcagtcttagtgttgaatataggaataacctatttatatttgaaaatcaaagtatgcaacattgcatgaggaaaacggttgttattttcactacctgtaactataatgattacaggttggtcgataccaatcaaaaaaataaaatcatcgtgaatggagatgtttcataatgggtatgaaaaaattaattttagcaggtgctttagggatcgcagcattatcaggaacaaatttaccaggactagaagtaacaaaagcgagtgcagcttctattgaatcgaatttctcgacgttagaaggacgagtagtagaagtagataacggtgtaattgttgtaaaatctaagcaatatgaggaaccggttagtgtgtatattgattcactttcaaatgtgaaagtaggagatgaagtaaaagctactggatctatgatgcgtaattttacagaatatatggttgcaactgcagttgaaaatacaacaaacaagttaggtatgcacatgaaagaagatggctcacctaattatgtaattggagaagtatcaaaagtaggaacgatggaagatgagggagacggtgctactaaatatgttgtagttgagtatccatcgttaaatgggaagaaagctattattgatgttttcttaacaaagggacaagtatttaatgcgggtgagaaagtgaaaattgatatgaagtatgtagggtggggcggaagttctattaactggaacacagttgaccatattgaaaaagttcatgaagcaaagacgaacgctgaaaataatgatggtgtatggatttggtcttaattaaaatcctgtaaataacaaatgtatcatgtagtatccagcaaatggtgatgtgtatgaccatttgctggatacttttttgctttgtattttattgagaataagggatatccgactagaatatgatgtttaaatcggtgcgagttaaaaaatacaataatgaaagaggggtttatatatggagcgagatgagaattatttacgagctaaaaaaagagtggagaatttaaaagcgttttacattcatttaacggtctatatattagttaacttaatgctttttttcataaatataagctctgattcaagtaaattatggtttttatatccacttggaggttgggggattggtatcgttatacatggtttaacaacttttccatttgggatattcggaaaagaatgggaagaacgaaaaattaaagagtatatggagaaagataagtgaaaaaatcagagatttatgaatataaatctctgtgagcacacgtttgatgcgaagcctattctatagcttcgcctatttgttttgtactcgaagttaatgcgagtacgtgttcctattcatttttagcatgaattgcatgtgaaatcaaaactttagttgtagtacataataaatacagttattttactttcttaattacaagtggatataggataaagttgatttatcatcctatattaaaataaaaaacaaaccactgttcgatttgaatattccacgatataatggtgagagtttatgacagaataaatatttacataagaagtgaggtactgtatgaaaaaaagaacgacagacattatttttattattattggtgcatttctttttgctttaggtgtcaatttatttgttatcccgaacgagtttggtgagggtggggtaacaggtatcacgattattacgtactatttatttgaatggtcaccaggtttagttaacttaattttaaatgcgattttgttaatagtcggttataaatttttaaataaaatcacaacaatttatacgattatcgctgtagtgactaactcgctatttcttcatttaacagaaggctggacgattgcttcggatgaaatgcttgtaaatgccattttcggaggaatatttatcgggtgtggtattggtcttatcattcgcgttggcggaacaactgcaggtactacgatcttagcaaggatgacacataaatatttaggctggagcattagctacggtctactgttcttcgatttaatcgttgcattttcatcttatttcatcattggtgcagaaaaactgatgataacaattattatgctatatgtagcaacgaaagtgatggaatttgtaattgaagggttaaatccgaagaaggctattacgattatttctgataatccagatgaaattgccgggaaggtgacaaccttaatggggagaggggttaccgtgtattcaggtcatggctattacacgaaaacgccgaaggaaattctttatgttgttattaataagcaagaagtagtgaagctaaagcggattgttcaaactacggatccggcggcgttcatcgctatacacgatgttcgtgatgtgttcggagaaggatttgttgatatttcgaaggcttagaaattgtttttgattaaaataatcttaatactaaaacgtaagaatctattttgaataatcttttttcaaaatagattctttttctttttcttgcaaaaaatccaattgtttcttaatgtagtgatgtagaaggatgaacgagagagggtttaatgaagatgatacatattttattagctgatgatgataagcatattagagagttgttgcattatcatttacaaaaagaggggtttaaagtttttgaagcagaagatggaaaggtagcgcaagatgttttagagaaggaaaatattcatcttgcgatcgtagacattatgatgccgttcgttgatggctatacgttatgtgaagaaatccggaagtatcatgatataccggttattttattaacggcgaaagatcagttagttgataaagaaaaaggattcatttctggtacggacgattatatcgtaaaaccatttgaaccagctgaagtgattttccgtatgaaagctttattacgacgttatcaaatgctgagtgcagatattattacgttgcacggaacgacaattgatcgaaaaggtgtagaagtaaagtgtaacggtcaaacaattttgcttcctttaaaggaatttgagttattatcacaacttgctagttatcctggaagaacattttcaagagaagagctaattgaattagtatggggaatggattttgaaggagatgaacgaacagttgatgttcatgtgaaaaggctgcgagatcgtttctcaaaacgaacggatgattttcaaattacaacagtgcgcggcctcgggtataagttggagttgaaataagatgaaatcactatattctagatttgtatttatgacggtcggcattatgctacttagtagtattatcggctttttattaacgaacgtatattatcaagtgaagttaaaaccatataacagtgaaaagattttaaagtatgcggaagaagttaaatcgttatatgaaaagcaaagtgaagaaaatcaagagacgtatttgcattctattgcaaaattagggtatgagatttacattgttgatgatcaaaagaatggaaagcgtatcggtaatgcgtttcgtaagacgacaataagtgatgataccgttcataaagtattgcagggggagacatttaatggtgtttctacttatccaacgcgcctctttattacaggttttttcgataatgaattaattaatagcgtcggtgtcccagtacaacacggtgataaacagtacgctttattcattcgccctgacgttcaacaacaattcggcgagatgagaatttttctagcggtattattagggtttatcgtactattaagtattatttttatagcgattgcagcaggttacatcgttcgcccaatccgtaaatttacgaaggctacgcaaaaaattgcgagtggggaatatgaaattgaattagatgtaaaacgaaaagatgaaataggaacgttatctacaagcttccaaaagatgacgaagagtattaaagaactagatgaaatgagacaagaattcgtttcgaacgtttcacatgaatttcagtcgccactttcttccatacaaggtttttcaaagacgttgcaaacagaaaagatgagtgaggaagaaagaaatcattacttacaaattattgagggtgaaagtaagcgaatgtctagtttatgtaaacagttacttacgctcgcttcattagataaagaggaaaaggttctacaaataagagaattcaatctgcagaagcaaattaaagacgtcatttttatgcttgagtggaaatggcgggaaaaagatatcgccgttgaatttaatgtgccagatatcactataaaaggtgatgaaaacttacttcatcaagtttggagtaacattttcacgaatagcattaagttttcaaacgatggtggaacgattgagtttttcgtcgaagagttagagtctagtgtcattatttctatatcagacaacggaatcggtatggaaaaagaagaaatggatcgtatttttgaccgtttttacaaagtagatacagcaaggacgagaaacgtagaaggtagcggtttaggattgtcgattgtgcagaagattgttgaactgcatcatggaaacgtttcggtgtatagtacgaagggggaaggaacgaccgttcgggtggagcttccgaaatagatggaaagaaagaggctgtttcggaactgcctcttttttgtcgttttatgtcggcaagtcgatataatcggaaaatcgctgatataatttgagctgcgccgatataattctatttgcgctgatatatttgaaaaatcgctgatataaatttcacgtactgtatttctgctataaagccacacctttcccgcgctcaaaaagtatcagatgtaatttaatttcccctctgtaatcttctgttcatattccgttcatatttcttttttatgataagtgcatagaaagaaagaggaaggagcgagcgaaatgtttttagctctgcgtgaattgaaacaatcaaaattaagatacggattaatcggactgattatggtgttattatcatttttagttcttgttatttcaggattagcaaatggactatcatatgataatgcttcatcgattcaaaatatggaggcaaataagttcgttttagcagatgatgcggaaaataaattacttcgttcacaaattaagaaagacgatgtagataacgtagtaaatcaagtaggcgagaaagaagccgttccgtttcgtgtgaaagtttcaacatatgaaaagaaagatagttcgaaaaaggttgatatcgctattttctcaagtgaacgtgattcatttttagaaccaaaaattgtaaaaggtgagaaattaggtacagcaaataacgaaatggttgctgacgaatcaattaaagaaaaaggaattgatattggagatacaattattgatcctgtttcaaagaaagaatttacaatcgttggatttacgaaagatcaaatgtttagccatacaccagttgtgtatgtaaatgaagacgtatggggatctatttcacaaccaaatcaaaaagattatagtgcaattgcgctgaatacagataaagaaatcaaaaatgcacatgttatcgacaaaaaagaagtactgcaaagtattccaggatttaaagaagagcaaggaacattgacgatgatcattgcattcttacttgttatcgctgcgttattaatcggtgtattcttctacgttattacactgcaaaaaacacagcaattaggcgtattaaaagcaattggtacgaagaactcttatttagcaaatagcttagtcgtacaggcgttattcttatcagtcgttgcgatggtaataagtattgttcttgtacaagggttagaacaaattttaccagctggtatgccattcttattaacaacaccgatgattgcacaatatgcggcaatctttatcgttattagtattttaggaacacttatttcgttatatcaagtattaaaagttgatgcattagaagcaattggaggcgggatgtaatgacttcattattaaaattagacaaagtaagtaaagtgtacggagaaggaaatacggaagtaacagcccttcatccgatgtcgcttgatgtgaaagctggagagtttatcggaatcgttggtccttctggatcagggaaaagtacgttattatcaattgctggtgctttattatcaccgtcaaaaggggatatttacattcgcgagcaaaatattacgaagctatcagaaaaggaaatgacagacattcgtttgaaaaaaatcggcttcattttccagtttgcaaaccttgttccatatttaaatgtgaaagaacagttactttacattgcaaagctaaaaaaagaaagtaaacaagaatccggaaagcgtgcagatcatttattagcggcatttggattaggagaaagaaagaatcattatccaaatcaactatctggcggggaaaaacaaagggtagcaatcgctcgtgcgttcatgaacaacccagatttaatattagcggatgagccaacggcaagcttagactcaaaacgcgcacgtgaagttgttgaaatgatgaaacgcgaagtgaaagagagccaaaaagcagcaattatgattacacatgatgaaagaatgcttgatgtatgtgatcgtatattgacgcttcgagatggacagttaatataaaaaaaggaaaaccgtacatgtatgtgcggttttcctttttttatggacttatttagagaataacgttttaattttattacgagtaagtaataaaacaccgcctaatacagatagcattcctagagccatattgtttgattgctcgctaccagcgttaggaagttctttagcgttattgtttttagtaccattatctgcttgcgtttgtttagactgtgatacttcattaatcttgttgtcaacattttgcttcgttgtatgtaactcagctaatttgtcgtcaatttttttctcagtatgcttaaagtcgttgattttaatatctaagtcttgttttttctttgataaatcatctgaaacagtttgtttcgattgtttaatttcgttaattttattaattaaatcttgtctagcttcttgtaaaacagctagtttgttttttacatcttgtttagctaattctaagttagcggaaagactgtctaaattgcctttaattttcttaagttcctctaacgtgttaccggtattcggcttgttttcttttagttcagcgagtttgtcctcagcagtttgtttcgctttttttaactcagctaatttttcatctacttgttttttaacttccttaagttcattaaccttttgatcaatgttctctttatgttgcttcatttcattcactttttcatcgacagtttgtttatgttctttaatctcattcactttgttatcgatattttgcttatgttcttttacttcagcaactttatcttctacttgttttttatgctctttaatttcagcgattttatcttcggcaatttgtttgtcttgctgcagttttgcatctagttcttgtttatgctgtttaacttcgttaattttttcatcagcaacttgtttacgttcatgtagttcattcaccttcgtatcaacattttccttaactttgttaagttcgtttaatgtttgatccacgttttctttttgttgctgtaatttcgcatctaactcttgtttatgttgcttaatttcagctaatcgatctcctgtactttgctggggagtagtatcatttacttccgcatgagcagagttcgcgccagcaatcattgctaaagctagtgtagacgcagcgattgtttgttttgttttcatatttttgtacctcttttctttcatatgcatgagctgttttgtgtaaaattgagcatatagaagtagattcttccatcattatataccatctgcgctgcctagaggaagtatttgcataataatctatgattatgtaatttttataatctcttattttggagtaggggataaatctttagctagatgaacaatttcttcaatagtaaagcttatatctttattattgcgaataacaaacaaataatcagcctcattttctataggatctaccacatcatcgtgaagtgattcagtttgttgttgatcaaatacttctttgaaactagaatatccacctctaaaaatattggtacttcgcgtgcttcgagccactctttcgtaaagtacatcatctggaatgtcaaaatgaacgagtatgcgtacatattcattctgtggaaataattcgtttagtaaatataaccttccatttttactgcgattggagttactaataataaggtgtaaatttgtatgttctttcgcataatcaacaatgaatttagaaagaccgtgcttaaatgtattagcaccttcagccggctgtaatttttcatcatgcgtgttaataaattcagcttgtttatcttgatccataacgaaagagtggggtaactctttttctaatgctcttgcaaatgtagtttttccactgtgtgtttttccaactgtaatgatgactaatctttttatgacgccctccatttgtattgttatgaactggaatattcggtgtagatcgaaatcttcctgctagagattacacaaattgttgagcgttagtaggctgaaaacttgacaaaaaaacttatttatgctataatttaccaatataaaaataaagtgtataatagggttctcctggccaggggaaccctatttttgttgtaaaaatgaaggagagtgtatgtacgtgaaacaaggtgaagcaagtgtaacgtcgttagtatcagctttcagcagggcatatcatagtgaatttgataatccgaaggtctttgatgattatatcgctaaagaattcatatcgccaaaagaacgtaacaatattgaaacgaacatggttcaagggattcactttttcaatacagacattgcagagcggtttcaagacaatccaaaagaaatattaaaatggattacacaagttcagttatcaccaacacctttagcacgtgccgcatattgtgaaagagtattactacatgaaattacattaggagcgaaacaatacgtcatactcggtgcaggcttagatacgttcagttttagaaaccgagagttagagaataaaatagaaatatttgaagtggatcatccttctacgcaggcgtttaagaaggaaagaataaaagaagtagaacttgaagttccaaataaccttcattttgtttcgatggatttcacgaaaggatttttctatgagcagttacggaatgaaggatttgaaaataaaaagacgttctttagtctattaggtgtaacgtactatttaacgaaagaggaactttctagtttaatagaatgtttatttgaggtggttccggcaggaagttctatcgttttcgattatcccgatgaaaacttgtttacggaaaagggactgtccaatcgagttgaaaatatggtaaaaatggctgcggtaggcggagaaccgatgaaatcatgtttttcttatgccgaaatggaagcactgttagagaaggcgggcttactcatttatgaacatttatcgccagaagacataaataaattatattttgaaggacgaaacgattatttgaaagcttttgagacagtgcattatgtgcatgcggtgaaaaggtaggaaattagtaggcatggggaggaatctctgtgtctttttttataaaaaaggaaatgagctgtagtggtggaaaatataattataaatatatataaattaatgttttgtagaaactaaaggaaaggggaaatagaagatgttgaaattacaagggaaatacaatgaagcaaaagtgtttactacgaatgtagaaaaaactgcagcaggtcaaattattgatctttgtaaccaagaattcgtaaaggatagcaagattcgtattatgccagatacacatgcgggtgcaggttgcacgattgggacaacaatgacaattcaagataagattgttcctaatttagtcggggttaactaatcggctcagactttaaactactcactcaattgactgggaaccctaacgataaaaggcgagggcaatcagcagccagtggttatggtgacataatcgaatggttcagagacttgtaccatgttagcagactaaggtacagaattattcctcatctattttgaattgaagaggaataattaatacggtgagcctacagtagagactgcatatctcgatgactgtagagaaggtatagtccactctttcaggaaactgagaggtaagtacgatattggttgtggcatggaagttgttatgattaataagaaaaaagaggaaatcaacttcgatcacttagacgaaacgatacgtaaatttgtcccaagtggttttcgtattcgagataaggaacatagattttcaaaaatgattgattttgatagtgtaagagccccgtttacattgcaacgtgctcaaaaaagtattggtacacttggcgggggcaatcattttgtcgaactgaatgaggatgataaaggaaatgtatacattgtcattcatagtggttcgcgtaatttagggaaacaagtagcagagtattatcaaaactttgcttacgagcaacttataaacgttaaatctattaaagaagaactgattgagcgtttaacgaaagaaggtagacaacaagaaatacatgaagctttacgtgaaattaagaaaccggtgattcgcaaagaattagcttatttagaaggacaaggatttaaagattacatgaatgatatgaaaattgcacaaaaatatgcagagttaaatcgtaaggcaatgattgatgaaatcgtcactaaaatggattggaaagtaaccgatcaattcactacaattcataactacatcgatatggaaaatatgattctacgaaaaggtgctatttcagctcagaaaaatgaacgagtaatcattccaatcaatatgagagatggttcaatcattgcatttggtaaaggaaatccagattggaacttttctggccctcatggagcagggcgtattatgagtcgcaagaaggcgaaagaagtacttaacttagaggattttcaaaatacaatgacagaggtttggactacatctgttgcagaaagtactttagatgaagcaccaatggtatataagccaatggatgaaattattgagaatacaaaagaaacaattgatattaaacatattattaagccactttacaattttaaggctaattaaaagaggagtaacgtttattaaagaaagaaaacttgaaaagatagcatattttgtggcggttatataacagagattaaaaagacaacatattaaactaagagattcatcatattcatttacatttatgtaatgttaaagactaaaaagctagattggcgcgaattgctaattgtggagtgtgtagaaaagacaaaatctcttaaaaaacacttaattttttattccattaatctttacaatctccccctataatgtgaattggacaagcacctaagagaagcagaatatgtcagttggtacattctattattagggggagaatttgtatgaaaaagacagttgcttcgttagcagttatggcggcattattaccgacattttcagcacatgcggaagggaaagagcaagttcgaaaatcagctacaacttttaatgttattagtgacattcaaggtgatttaggagattttgatcacgtattaaaagatatgaataaagtaacgccactttctagagcgcttattatgaatggggatataacgccgactggacaacagtcacaatatgatgatgtaaagcgtgtgttaaataaaaataagcatccagaaaatgtatggtctactgttgggaatcatgagttttatgctggtaaatggacagcagatgggaaactctctcaaagtacatggccaaatggtgtaactgaggaaactttatttaaccgctatctgaaatttagtggacaagaaaaggtatatcataaaaaagaattagatggctatccacttttatttttaggaactgaaaaatatatgaaataccacgattcaaaaatgtgggatgaagtatatatgagtgatgagcaattaggttggttaaaacaaaatttagaagagtatagtcaaaaagataaaaataaaccaatctttattttctctcatcacgttttacctgatacagtatctggatcaagacaatcaccatatttacaagattatttaaacgtggataaattgtacgatatattaaaagactatccgcaggttgttttcttcacgagtcatacgcattgggatttaaacttacctgactgggctggtaaaaagaaaattaaaggcggagatgaaaaaggtttcactgttgtaaatacgggcgggattgaaacaggctggatgtcagcagggccaaatggaggagagaaaactgctccagatggctattcatttaaacaagggttacaagtgaaagcatatggtaacgatgtaattgtgacagcttacgattacaaacgtgataaggatataaagaagttattaattagtgattcaaaaattgcgcagatggcaccaaatgtaacggcagatgatagtgaaaatataattgtcggtgcaactgaatatatggagtattctatagaaggaacgaatgagtggcatacgtatagtaaagcaaaccctccgaaatttgatggggataaagtcgtatacgtacgccataaaggtgaaatgaatttagagccgggattaacacagttacttcgtttttcggtaaataagtgattggagggagtctgcatttgaatgtgtaggctctttttttgttgatgagaaaggaggtgcctgtctgtcgttttttgtcgatagatcgatatattaagaaaatcgttgatatattgcaagttacgatagatacatttgaaaaattgttgatatattgtaaggaatgaacgatatatttgaaaaatcgttgatgtaaatttcatgtaccgtaattaagttaaaatcattaatacggttttacttatcaaaacgaaattctaatacatttttaaccgagaaaggtgacttcaccatttttacgtgtaataatagtaacgttacatatattgtgaaagaagtacaaaaggagcgttacaatgaatttagctaaattcccgagaaaaaaatatacagaatcatatacaccaattgaaaagttaaacaacttttctgaagcacttggtggcccgactatttattttaaacgagatgatttacttggtttaacagctggtggcaataagacgagaaaattagaatttttagttgcagatgcacaggaaaatggtgcagatacgttaattacagctggtggtattcagtcaaatcattgccgcctgacacttgctgctgcggtaaaagaaaaaatgaaatgtatccttgtattagaggaagggcttgagccagaagagaagagagactttaacgggaactatttcttatatcacttattaggtgctgaaaatgtaattgttgtaccgaacggagcagatcttatggaagaaatgcataaagtagcaaaagaagtaagtgaaaaagggaatacaccatatgtaattccagttggtggatcaaaccctacgggtgctatgggatacgttgcttgtgcccaagaaattatggcgcaatcatttgagcaaggaattgatttcagttcagttgtttgtgtaagtggaagcggcggtatgcatgccggtttaattactggtttttctggaacgcaaagccagattcctgtaatcggaattaacgtaagtagaggaaaagctgagcaagaagagaaagtagcaaaacttgtagatgaaacttcagcacacgttggtattccaaactttatcccgcgcgacgctgttacgtgctttgatgaatatgtagggccaggatatgcgttaccaacgccggaaatggtagaggcagttcagttacttgcgaaaacagaaggtattttacttgatccagtgtatacaggtaaggcggtagcgggattaatcgatttaattagaaaaggtaaatttaataaggaagacaatattttattcgtacattcaggtggttcaccagctttatatgcgaatacttctttatttgcttaagtgtaaaaagcattgggtatccaatgcttttttgttatataatggaattgctgggaggcgggaggatgatatgaattcaaatttaaaatggattatatatacggtactcggcatttctattctattaatcttatttgtggcttatggggtgtattcttattttacattttaaaagcgtaatggaagtgaaccataatgtaatgtatgttatagtttgatatgttaattacttacaatactttctacaaggagaatacataatgagagcaaagaaactagtaacgttagcagttccatttatgctgttagtcggatgcgaggtaggagataaagattctactcataagactgagcaaactagtaaagcaataacgaaaacagtaatttctgaacaacagtatctgtactacatatgtgagcaagtggtagagttccaatttaagaaggatgaattgttactaaacttaggagaatccttaaaggacaaagaaaaagcaaaagctgttttaaaaacatcaaacgagatagataaaattttagacaatatggaacacataaaagtacctgatacatacaaagacattcacaaatccatacaagaaggggtaacagaggcaagaaaagcaacgaagttaattaaggatgctggtaaagaagataaacagaagattcaagaagctacaatgaaaggtactgaatttttatcaggtgtagacggagagcattggaaaaaagcaatttatgagttatcacaggaaaacaaagatgcttatagtaaggcacttgataagaaagtaaaggagcactcaaagtaaaacagtaacttgtaataatacatatccacctaaaatttccgcgaatgctatgctaggaagttaggtgggagattactgtccttaaatgtggttgattaaagctacagccacattctcctgttctaattaactaaaagaagaacttccccatcccgattagactactgatcattcctattccactcatggtaccttttcctgctgtaagtaagtttccaatcattcccagctgcccgtaacctccgttattcccccatcccatgggacttatctgtcctccccatcctggagagtttccgaaaatacccccgttattggtattgaatttaaaagccttagctggcggcgatagtaaagctgcgagatgaccttgtgcgaacatccctgtatgattgaatggttgcgcccaggggaagggaggtttttgaaaattaaaacctgcatgacctggtaatggagtccaattagcagggtgaccttgtggtagtatctctgcataattaattggctgctgcccccaagagaagggaggaggttggggattgaaccccgtataattggctgatgaatcccaactaactggatagactcggtaactccaattctcaggaagcttcaaatcattcattacctcagatgtagttatttcgggctgtgaatataatgaaatttggttagtatattgttgcccatttccctttgaattcaaataccaatattggtccatacgcttattctcctcactttaaaaatgtaatgttagacttagcctatgtaatattcctttttatggatggttacataactagatctacaagcctgtatttaaaggaatgggtgcgtagtctttttgatttttctcgctgcctgtaaaattcccattgatgtaaagtttcactttattttagaaggggattttcagttgcttcttttttgtatttcagcctaatttaaattccgttaacaaacatttttataaaggtttaatcaacaaaaagattttaaaatggtatgttgagcaagtggaattgctaaaaagagaatatccattcgaagagtttggcaaaatactgtaagggtaatgttttcttgtgcaaatatgtaaacgatttaaacgaatcaatgaaatttataatgaaggggcaattaaatatatgagtgaaacattacataaaagaaaaccaccatatgtaatgcttgtaatcctttttattggggcatttgtttcatttctaaataactcccttttaaatgtagccttgccatcaataatgaaagatttaaacattcaagattattcaacgatccagtggctttctacagggtatatgcttgtaagtggtatattaattccggcctcagcatttttaataacgcgtttctcgaataggagcctatttattacatctatggtgatttttattcttggtactgccttagcggctgtagcacctaactttggtttattacttactggtcggatggttcaagcggcaggctcttcagttatgggacctttgttaatgaatattatgctagtaagctttccaagagaaaaaaggggaacagcaatggggatttttggactagttatgattacagctccagcaattgggccgacactatcaggttatattgtagagtattatgactggcgtttgctttttgaaatgattttaccgttagcaatcattagcttactgttagggatttggaaatctgagaatgtcatgaaacaaaacaaaaatgcaaaacttgattatctctcattactattatcttctgtcggttttggcggtttgttatatggattcagttctgcaagctccgatggttggacaaataaagttgtcttaacaaccttaatcataggcgcaattgccctaattgctttcattattcgtcaattaaaaatggatgagccgttattggatttacgtgtttacaagtacccaatgtttgcacttgcgtctgtaattgcaattgtcaacgcggtggccatgttttcgggtatgattttaacaccagcttatgtacaaaacgtccgtggcatttctccgctgagctctggactgatgatgcttccaggtgcggttataatggggattatgtcaccaattacaggtaaactatttgataaatatggtcctcggattcttggcatagtggggctttccattacagctgtttcaacttatatgttggcaagtctgcaaattgactctagtcacacacatattattcttatctacacactgcggatgtttgggatggcgatggttatgatgccacttatgacaaatggtcttaatcaattgccaactcgcttaaacccgcacggtacagctgttaataatacggctcaacaagtgtccggttcgattggtactgctattcttgttacgattatgaactctgtaacaaaaacaaaagctgaaagtttaatgtctcatatagatccaacaacctttacagaaactacgaaggcaatagtaactcagaaggctttattatctggaattcaatattcgttttatgtagcgcttggcatgaatgttgttgcactactattagtttttttcgttaaacgtgtagatacaagtgcggaagctgtcgagaagctaaatcggtagagaaaaataaaacgcttgataatgattccaacaagttttttgctgctaaggcgccggtatttaaagctggaaaagaactaaaagaagcagggaaataattatatagtaaaagaggacctgatgttcatatcaggtcctctttcattagtaacacggtatacttgcttatcgtattggtttaactaaactactgatttttcgaatactacaatcttaagctcgtcaacttctctatttttggggtgttttagaagaaaaatgaatcaaaataatcgtttttataaacaaatacaagagatgagatccgtttgcaatttctcataaacattacaagtttagattatcttttaacaccaacattaaaaggctccaactatatttattcgcttcattttaatttagtatttttctacaagttataagtctaattgccaagcttatacgtaatatcataatcatgaatagttagggaaaagataaaataaggtaatcaattacatatctttatcccaggcgattagttgctatttcctctttattaaatgggatatgttatttcatgcttttttgaaagggtgttttaaatggaaaaaaaagtatctgccattcctcagccgaaaacatatggaccgctgggtaatctcccattaatcgataaagataaaccgaccctatcctttatcaagatagcggaagagtatggtcccatttttcaaattcaaactttaagtgataccattattgtcgtttccggacatgaactggtagcagaagtctgtgacgaaacacggttcgataaaagtatagagggtgctttagcaaaagttcgcgcctttgctggagacggattatttacaagcgagactcacgagcctaactggaaaaaagctcataatattttgatgcctacatttagccaacgggcaatgaaagattaccatgctatgatggttgatattgctgtacaactcgttcaaaaatgggcacggcttaatccgaatgaaaacgtggatgttccggaggatatgactcgtcttacgttagatacaattggtctatgtggttttaattaccgatttaatagcttttatcgtgagacccctcatccttttattactagcatgacccgtgctctagatgaggcgatgcaccaattacagcggttagatatagaagacaaacttatgtggagaacgaaacgtcaatttcagcatgatatccagtctatgttttctttagtagataatattattgctgaacgtaaaagtagtggagatcaggaagaaaatgatttactttcccgtatgttaaatgtacaagatccggaaactggtgaaaaattagatgatgaaaacattcgtttccaaattatcacttttttaatagctgggcatgagacaacaagtggattgttatcttttgcaatttactttttattaaagaatccggataaattgaaaaaagcctatgaagaagtagaccgtgttttgacagatcctactccaacataccaacaagttatgaaactgaagtatatacggatgattttaaatgaatcactgcgtctatggcctaccgctccagcattcagtctctatgcaaaagaagatacagtgattggcgggaaatacccaattaagaaaggagaagatcgtatttctgttcttattccacagctacatagggataaagatgcatggggagacaatgtggaagaattccaacctgaacgatttgaagagctggataaggttcctcatcatgcttataagccatttggaaatggccagagagcatgtatcggtatgcaatttgcacttcatgaagccactcttgtaatgggaatgcttcttcaacattttgaattaatcgattatcaaaactatcagctggatgtaaaacaaacattaacgctaaagcccggtgattttaagattaggattctaccccgaaaacaaactattagccatcctactgctcttgcacctacagaggacaagctgaaaaacgatgaaattaagcagcacgttcagaagacaccttctattattggggccgataatctttcacttcttgttctgtatggctcggatacaggggtagcagaaggtattgcaagagaattagcagatacagctagtttagaaggggttcgaacggaagtggtagctcttaacgatcgaattggaagtttgccaaaagaaggagcggtacttattgtgacttcttcttataatggaaaaccgccaagtaatgcagggcagtttgtgcaatggttggaggaactaaaaacagatgagctaaaaggggttcaatacgcagtttttggttgtggagatcataattgggctagtacctatcaacggattccaagatacattgatgagcagatggctcaaaaaggagcaacaagattttctaaacgcggagaagcagatgcaagtggtgattttgaggaacagctcgagcaatggaaacaaagcatgtggtctgatgcgatgaaggcatttggattggagctcaacaaaaatatggaaaaagagcgcagtactttgagtctgcaatttgtcagtcgtcttggaggatctcctcttgcacgaacatatgaagcagtttatgcgtctatactagaaaatcgtgaactccaatcatccagcagtgatagaagtacacgacatatcgaggtatccttgccggaaggcgctacatataaagaaggagaccaccttggagtgctgccagttaatagcgagaaaaatatcaaccgaattttaagacgctttggattaaatgggaaggatcaagttatactgagtgcaagtggacgaagtataaatcacatacctttagacagtcctgttagtttattggaccttcttagttatagtgttgaagttcaagaagcagccactcgagcacaaatacgagaaatggtaacattcacagcatgtcctcctcataaaaaagaattggaagcattattagaagaaggagtttaccatgaacaaatactaaagaaacggatttcaatgttggaccttcttgaaaagtatgaggcttgtgaaatccgatttgaacgctttttagaacttcttcctgcgctcaaaccgcgttactattctatttcaagctctccactcgttgtacagaatcgtctgagcattacggtcggtgttgttaatgcgcctgcatggagtggggaagggacatatgaaggagtcgcttctaattacttagctcagcgtcataataaagatgagattatctgtttcattcgaacgccacaatcaaactttgaattacctaaagatccagaaacaccaattattatggttgggccaggtactggaattgcaccattccgtggattcttgcaagcgcgtcgtgttcaaaagcaaaaaggtattaacttaggagaagcacatctatattttggttgtcgtcatcctgaaaaagattatctttatcgtacagaactagaaaatgatgaaagagatggattaatctctttacacacagctttttctcgtctagagggacatccaaaaacatatgtacagcatttaataaaacaagatagaatcaatttaatttcgttattagataatggagctcatctttatatatgtggtgatggaagtaaaatggctccggatgtagaagataccctttgtcaagcgtatcaagaaattcatgaagtcagtgaacaagaagcaagaaattggttggatcgtgtgcaagatgaagggcgatatggaaaagatgtttgggctggtatatgactgtttcttaattagatacatattaactaataaacttctttcgaataaatttcactttattagtatcgtgtatttagatgaatagtgattaaccggactatttagtatctactaaataaaaaacaggacctgatatgcatctatcaggtcctgtttcacatagacattatacatcgatattttccacgcattatcaatgtttgtaatgtagttagccttttgagtcagctataaaatcagatattattttttcaatatcgaaaggagtaatccctttatccaaagaaaaaatgctttctgcttcttcgatgtcttgaacgagttcacctctagcttcaatatgtaatcggaacaagtcatataaattcggtttaactaaattagttaaagccttcccaactagtatcatacctttttgattagcctcgatggtattatcataagttagatctctcgtaagagacaaatctgtccaaatcaattttcgttcctttaagtctaaaataactggaatagagatttgggtgtcggcagtaatatccactttatcttgaacagtagaaggttcaaatatttcacctgaaccaggatattgacgaaccatccaaccagtaaagcattctggtaaatctttatacggttggtctgtgtaagaaagcaaagtcattactacatagcgtgcaccatatttcagcacagacggaatatcgaaatcaatgaattcagatgccccctttggtgcagaagtaatatctccgctatggtaggctttgaaattttttgaacgtaagttcgtgaaggatacatgttctttgtattgccaatcttcgtcgtacattgcagcagataaatcaatgtcaacacgtcctgtatgttgtccattcacatagccttctttccaccataggaaaaaacgaatcgtatctccttctggcaaatctactttacttcctcgagataatgtgcgaagcgctttgctggctgaacgttgagagaagggaactaagtgattttttaactgttcatccaaaaatacttttccgagacttggaagttctgcgaagcgattttttaaagtatcttcacacatttttacaatcattaaacaaatatcctctgagataaatggaagtgtattttcgatacctatagcttttgctacatttccctttggaaaaaaggtacgaaattcatttttatcatttcgatgcttaaaatgagctgtgagttgaagtaatacaggagtagaaacgtttcctattatacttagaaaatcttcgagaatattgaaaacatctgttgacttatcactacataaacggattaaatgatccaagcgtctggcaaattcccccgggcgagtttttaaaagattttttgctgtcatgatatcacgattcaacaaagctgcttctatttttccattaaatgtttcaactttaatgttgttgcgaagaatctcaaatgctcggtgggtttttgggaaacgagtatgatattctgctggatgaagaatttcacctaaacgaatccaacgttttttgtatcgaagcatatcttcggtaatgtttccgcattgctctaacaatcctaaaaggaagcgtctttctgctcggttaaacttcttgaatcggacggaggatgctaaactcacatcgccttcagataaagcaactgcaaggcgaagaacatcagttgctgttttaaaatactttgcagcagcatcggctgatatttttctgtttattaataaaaccccaattataaaagacatattttccttatgaggaattacattaggtagaaaacaggaaacatcttcagtgtgtgtaatagcccattctacatccgtcttatcagttgaggaaatagagctgtttgcactaatcaattgagaaatcatttgattgaaatcttcttcacttcctaagtcaataactttcaaatcaactctatctaaaagagggagtcgttcttctacttttgatacaggtaggcgcaacgtcacataatgaataatggcattaatgtataaatcagcgtcacttaaatccatcatttgttgcggaaagtttggatacataggagtaaactgaatatgtgctccaaccatttcttttaaatgttttaccaattctttgtaaaacgatgtgaatgcatcaaccgaaagtgtttgcaactcttctattaaaggctcggaaaaagtaaatcctaaattttccaagttttttaaaacagtggctaaataaatgttcggtagtttattttcttctctttttataattactttcaaacttcttcttatgtaaatagaatttttcatgagaacgccagctattcacgccttataaaagaggggaatagtctgactgtcctcctttcagtggtagatttttatttttatatgtataaacacactaattgtagaaaaatgcacagagggtacatagctattttttagtggaaaattagggatataacatttagttgttaagtggtaatttgttaattaagaaaagaaaacctctacatcaatggttgataaactaaagtttatgcaatcccaaagaagaaagaggttttatagtctaattatttttcatagggaattgacaactctaaaacaatttgaaatttctacaaagaaggaagaattgtcatagcctatgtgtttagcaggaaagtaacatccctatttggccaaagaagttagaaggaaggaacgtcatagcctgctttattagtatattctcttgcgaagagcaattcaagtatactgtctgattttttatttttttcttaaaggggaattttcatgattatcccgcattaacgggcagccagattggtgagggtgattaaagtttcactttataaatagggagaccatcacatgccctttttataatgctattacgggaggatttttatttttgatatattataccatttatttaatggtataatatggtatgcgttctgtggaatggagttgaatgagtattataaatacaaaaggtgaaattaaaaaaacgaaaagaaaagtattactaactatacttactatgttagtaattataattggatttggatattggaaactttttagtttgcaaggtgttccaaaaggggaattaattcgaacagtgaaatctccagatggaaaatatctcatcaagacttattttcataatgcaggatcattaagtgcggatgctgttaggggtgaattagttaaccttgatacagattcagagaaaaatatatattggaactatccagatacagatccatatattgaatgggtaaataagaatattgttagaattggagatcaaactttagatgtttcacagaaagaaacctatgattggcgtgatgacgataagcacgttaaagaaatgcctaaacagtttattagataaaataagaaaaattaaatttatttaatcttattcgtttaactatagataggattatatgagtgaaaaagtccatttagattttctaaatggacttttttagatttctagatacgactactgataaaaatggaacaaacttgttatttaggttgtctattaagtatacgtataaaacaggggttcatgatagttcactcattttatgaaaagtgagatgcaagagagtgatatccgatacactctttaattgtatcgatatgtataacatctaaaaaacatatattcttgaaagaggttgaaaatgtatgatagtcttaaacaagttttttaacattttacattacaaaaagatggtacctgtagtatttctttcatgtgcaacgcttataggctgttctgatggtaatactcaatctgaattacctaaacaaacgaaacaaacaaatcaaatcaaacaagaaattactggtaatgattcttttgttaaacttgaaaaagaatttgatgctaaactcggtatttatgcattggacactgatacgaatcaaaccgttacttatcaatcagatgaacggtttgcatacgcatctacccacaaagctttagctgtgggagtacttttacaaaagaaatcaatagaagatctaaatcaaagagttttgtatacccgtgaagatcttgttaattacaatccaattacagaaaagtatgttgatagtggtatgaccctgaaagagcttgcagatgcttctcttcgatatagtgataatactgcacaaaatcttattcttaaacaattaggtggacctagtgaattcaaaaaatcactaagagaagtaggagacaccgttacaaatcctgaacgttttgaaccagaattaaacgaagtgcctccaggagacgtacgtgatactagtaccccaaaggcattagctactagtcttcaggcttttacgctaggagatgtactttcaactgagaaacgggatttattaatagattggatgaaaaggaatactaccggagacaacttaattcgtgccggagttccaggaggatgggaagtagctgataagactggctcgggatcttatggaaccagaaatgatatcgcaattatttggccaccaaataaaaaaccaattgttcttgcgatactttctaatcatgataaagaggatgctaaacacgatgataagcttattgcagaagcaaccaagatagtgttagatgctttaaaagtgacaaataaataataatagtaactagttattattattttcccggtttttcgtcacaatattgtgagtcatgattttgctagcggactaatgtttatggggttcttcgttggagttgcatttttagcaacgatggcaagttgcttaatgtttaaagttctgtcgggagcatcaaaagatgtggcacgttatcaaacgtttcgtaaaattgttgtccgccgagaattattaacaaactcaatctataaagagttatacttcatatttttattcccagcaattgtcgggattactcatatattatttggtatgaacatgtttagtcctattttaatcaatccgtactctcgtatttggttaccacttgttatttttgtagtaatttattcgatttattacttgattacagttcaattatataaaggaattgtactctcgaaaaaaagatcaatgtaatgatgttattcataaagaatgatagataatcctttttggaaagaacaattaagagagagataacattaattatcgactgtatcgaaagtgaaatcacttctttacagaaggagatggagaattaagtcaatcgaatgaatattatagcctgctaatatcccagagtatgttataaataatattgccacttgggtgcaaggaagattgaaatgaaattagcaaccatatttttaaatagttattttcagaggcaacaagtgtattagggagggggcatttggcttagaggaatcttcatgtgaaaagacctgaaacagccttccctatagcaataataaagatgtctaatttctaatatagaaaataatagcgttgctacattcaatatgtagcaacgctatttaaattttttaaacagggttaaatttttcaagaaatttacctataaaaaatgatatccaattaaattcataagtttatcctctatgtattttgtaactacatttcatcttgctgtaaagaaacaaaaaacacttttttattcaataattccaatttctagagccttttgaacagcttcttctttgttactgactcctagctttgtataagctgtggaagcataatttctgaccgtaccattcgataaatataaccttgatgctatggtagtgtaacgaagtccttttgctactagctgtaatatttctatttccctagctgttagctcataagcggttgcttttgattgtggtgtctcttttttctcatcaaacttctcaaatattttgtgagacattccctgatcaattagtgtcccacctttgtgaataagtcggatcgtattggctagctccaacgtttcaatagatttaagtaaaaaaccatccgcaccgttgcgaagtgattccactgcctgttcggtatcttgaaacgttgtaaaaatcaatacgcggatatgtggccattgttgcttaatctttttggttgcttcgattccatccatgtgctgcatatctaaatccataagtataacatggggttgaaggcgcccacacaaatcgatggcttgattgccatcctcagccaagccgactacatttaaatcttcatatctatcgagtagtgtcctcaaactttctcgaacaaatggctgatcgtctacaattaacaaacgaataagtccattttttatttcagtttgtcgcggtatggtgcatgtaacaagcattccttcttctggctttgtatatacagacaaatgaccttgcaagttcattgcccgttctttcatcgcattcataccgaagccttcctgccattctacatttccttttccattatcttgaacttctaacctcgtatattgttgttcaaactgcaatgaaactataatttcagtcccttgaccatgacgtactgcattcgtaagggactcctgtaagcaacgaatgaatgtgatcttcgcttgccgagatagttgatattcctctccgaatgtcctaaaacttacatttacctgagcgtgctcctgaaattcggctccaagattttgtagagattgaattaaggaaggcgattgacatggagaatccatttgatgtaggtaacctctcacgtcctcgatgcttttacgtcccatttcaagcagagaatctagcctctgtatacccatttcagtagcaagttcggtacgcaacgtttccatccccataataatagaagtataagcgtgaccaactgtatcatgaagctcattcgacagtctgttccgttcttctgccaatgtaatgcgttcaatttgagacatatattgctcaagtaccgcgttttgtttacgaatcgcttcattttgcttatgattgacgattagtaaatggaaagcgaatcccattacataagcaagtccatagtaggtaaccataatccaatagctattacttggtgcaaccgcatagagaattccagttgttataaaaactgttgttggagctgtccaataataggacaaatgcttactattcgcagcaattagaaacaccgatataagaaatgtcttgttagcttccggaaataaggaggttaaatatatacacagtccaccatatagcagtatttctgtggacaagtaatatttgtaattgaacagtaaggctacccatggaatagagaaggcaacaacctcccaaaaaataataatccaaagtggtagtgtcaaactattctgaaaatctaacgtgattacgacgatagagacactaacaagtatacggactcctaacataatccaatcgtaccaaaaccaatacttaaccatatctaacaagttattcccccccctaagtagcctaccattttacttcctatattataaattaatccttcatacattgttatactttttaattttacactacaattttctcgcaaaagggaaacttctatcgatttagttgccgaatcatgctacgggtatagccaccaattttctttgtcaaacgttctactattctaatacttatggcggtaaatactatacccataaacattacaaagagtgacttggcaaaagtatctatctgtatgaatataatattcatttcaatgtagcgatacagtagtggtgccaacaggaacataagtggcattacataaaaaatgattgtactaatgagactgaaaatgccaatcactaatttctgcattaaccaaaagacagcagaccaagtgcgacgatcagtaagcactaatttcacctgagtccagttcgatgtatctattgttatacttctgtcataagagtctgttgaaatatctgtataaattttcgtctgtatgcgttcgaattgaataaaaggtgtagtagtctgtagtacacgtataattagtggaatcccaattaccgtaaatgaaagggtgaagctgaatagcagagctattagataaaaacaaaaataaaacaaccctgtaacgaaagttagcaataaaaaataaccattctgtatgaatcttgatttcataaagttcatcgctcctatctatataataaccgaatcatactgctttttttgtcattctcactagtgtaaaagtgtcatatgacatttctaaatgatgttaaaaaggggagaacaacctacttctggttaaaaaagatgcgtatattaatctccataaaacaatcccgtttttgcatctgcaagaacgggattgttttgtatttttatttaatatgagagtgacttgtttttcgaatatgaaaaataatatcaaattgctcaagcaatgatttatcaaagtatacagatttgttcggtaagagtcgtgcccctatactgagtaatggtctttttgctttaacccatttctttgctggtcctttaaggtgacgattatctaataaaaacatttcatatggtacttttccgagggtataattgaaactatttacatcttgtggaatcagatccgttataatcttatcttgggtgtcgttgtataaggtgacattcccctccgtagttgtactgccaattgtgacataattattgtctaaacgttccttcaaaaactgccccgaggcataagggtatgattcctcatcgataattcctttagccatatgaatattgtgtgtccacactatcgttttaccacccaatctctcttgtgcccacattgcatgatcggccatgtattgctcatgtagctttaacagacttggaaagtcgttaggaagtagcattgtggtaaatttctctattgcacttgccgttgctttcgcccagatgtactcgggtgaagctatttctgtgttggcttgcccattctcatcttttagtaattgggctactctctcagcgtttgccttgaacttttctcttatttcaggagcaagtttcatatattcctgtaaactgccagtaaaagacggcaattctttataattttcttctacttctgccagcaaatctggtcgatgcacccttacataatcaattactttattaaagcaaccttggtccaactcctttaagtcgagcccaataaattggatcttttttttattggatggatcagcattataatctttcatccactcaaccatggctataatttcatcagtaggatataacaagtttaaaaattctctagggtttccttttcctgtttggatatattcatttagttttaagccgtttccccaatcttcttccattgtgaagtttgtaaaacccatctcagtaaccaaatatttcacaaggcgaaacttcatagtgaaaatttcagagcttccatgagtattctctcctaatcctacatattgtgcgctcccaatcattttcttaagtggttttaaatcctcaaatgattttgacggctctatcgtttttaatggataagcctgtgattgtattgatttaactatatttttttgtattgattgatttgaattttcgactgctactgtttgagcctttcctacttctacacatcctgtgactaataaagctgtactaaccattgcaattattcttttcttattcattttttccacctcaattgaattatttgtaaaagcaagattgattcattgtacttgcacgaatcaattgccttaattcaattgttatctatcccatatcatattttctagttacatattgtcataaagttaattgacacagatcatatgctaatcattacacttttgtactatcggctatgacaacttataaataataattacattgatgagtcgtaagtaagactagattataaatgggggagggattttaaagatgaatgaatttgtatacaaaaatatttttattctaagttgtgtctgtggaaatgacaagaagtatattcgataaacaagtgaattataggggaagggcggattacaatgatattaaacgcaaaatcgttccacaataaagataaaatccaacgtgctaaaataggacttcaactttttctgagtatcttaatcattacttcaattatcctaaatgtagtagtaataattacgaaaagtatgccacttattgtggtatatatgtttaccccagcattatcttctattttgactcgcataatactgaaagaagggtttaaagatgtatcttttagtctcggtaacttaaagatatggaaggggatcggttttgctctgctaatccctatgattatttgtggaattacttattctatcgcctggttgagcggaattgcggggtttcagtatcccgaagttggtatgtttattttagaaccgatctacaatatgcttgggcttcagtatgtaacggcaccattcagcttcatttatctagtagtattgagcggcattttcggaagtttgcttggcttaatcccagctttgggagaagaaatgggttggcgaggttatatgctcacaaggctagtcgatgcagagttttcacggcccatccttattagtggattgatttgggcaacgtggcatgttccaatagttattgctggtctatatgtagcgggaccatctgtcgttctttcagtacttggtatctatctttgtattgtaccattcggttatattatagcttatttacgacttatcacaggcagcatttggccttcggttatcatccatgctacttggaatgccattattcaaggacctttcacacgtgcaagtacagggtatcaaactgagatttggattggagaatctggcttgataaccgctagtattatcttgattactgcaataattacgtctcgaatcgtgaattttactaaatagcatacggatgtgttttaaattcaattagtgaaatatgacgaggcgaaataagatgctcctaaaaatattagaaaaaatctagttgaacagactcttacttcatcttaggctgctggatatgtgggggacatcaagctaagaaaataaacttggttgccataaaaaacataatgttttcatttaaaggctatgagatgaaatttcatcatcttcatcaagtttgaccttcaggaaataaaaagttaaacgattatacaaatactctaactgaaaaaacgatagtccttctacattttagatagaaggactatcgtttatttttttgacaaaattaggaggtgatgttcataaaatggataatataattcgtatttgcgtaaagagaaaaagttttccaaagaagatgtagttaatttccttggtataacggttgattgaaatttcattttataacttgtaaagggctgtgcaatgcatcgtactattgaaaaatctaaatttaatcattaaattgcgataaaatgtggtcggaaataatgaaattttaggaaaaataaggtacactagtttatgattttagttgaaaatcgtttgacgttaatgcatacgggggaaagattgatgaacaacaatacaacaaatgaatcagttgaagaaattgatcaaaaacgagtaagatcaaaaaaacgttatacaaattggaagtttattgcagcgggtattggtgtaattgcacttcttattgggggaatgagttattatcaggcaactcacttcaattcgaatgttacaattaatgacacaaaagttggtggtctgagcgctgatcaggcaatacagaaattaaagacatctggactagcaaacaaagtctatgttgatcaacaacaaattttagatgaaaaagatacaaaaacggaacttacggaaaaagatttgcctcaagttaagaaactattaaaaaaccagtggacatttttcccttcctcaaaggtagaaaattattcattgctaccagagaaggcagatcagtatcgtagtgaaacgttgaaaaaacttgtagaagaaaagctcatctctatgaatgagaaattaaaagcgcctcaagatgctatggcgaagctagaacaagggaaaattgttatttcgaaaagtgttgaaggaaaacagtatgatgttactagtctactgaaagattatgataagcaaaaatataaaagcgaaattcatctgaagtctgcatacataaaacctattaaagaagacgatccgattgtcaaaaaagaggagaaagcactacagaatcttcttgggcagtctgttgagtataaagtgcaggatgaagtttatcctttaaaagcgaaagatttaattcaaaatgcctctatgtcaaaggatatgaaagttacaattgatgcgagtgacattaagaagaaaattactgaaattaataatgccaaatcaacattaaataaagatttctcatttaaaactcattccggttcagtcatatcagtaaaaggagaaggatacggctgggcactagatgttgaaaaagaaactaaacaagttcaacaagcctttgagaaaggcgaaaaatcgctttctgcttctaatattcacgggaatggttgggagaaggaaggcatcggttataaaacaacatcgaataatggcatcggagacacgtatgcagaagtttcaattgcagagcaacaaatttggatttacaaagatggaaaattagttgttacaacaaatgtagtaactggtaaacatagtactggtgaagatacatcaccaggtgtgtggtacgtcctatataaacgaacaccatatacgctaagaggtaacgcagtaggaaaagctgattatgcggttaaagtagattactgggtcccattcacaaatagtggtcaaggattccacgatgccggctggcgcaaagactggggaaataatgcttatttaacaggaggatcaggtgggtgtgtgaaccttcttcctaatgttgcaaaaactgtatatgatagtttgaacacgtatgatccagttattgtgtattaaaaaatagctacgtatcaagaaataaacaaagcaggaaatcttacctgatggtatatgaaaaaacacctcttgcattcgcatactaagtgtgcaaatgcaatggaggtgtttttgtttgaatacaagagcgtattgcttataagaaacaaagtagaaagaaataataagtattcaaatagtcaataaaattgacaatgaatatcattttcacttaatatagaatcattgcatttaattagacatgaattttttgttaatataatagatttctattaagttgtcacatttaagaactatcattaaatattttaagaatttaaacgtaggaaagggtaatataaaatgaactggaaaaaaggcggattatgggttattatttttttcgttgtaaaaggcacgatttctacacttttaatcgttacaggtgctaaatattttgatttatcatttatgcaacttatcttattaattctgaccttattagtgatttctctaataagccgaaaattgctgtatagacataaacaaaacaaaaagcaaaaagagctaaatatataatggagccccagagacctttggatttctggggttttattttgatagttttttcgcatgtatatcaatttaacagaataggttgtccaaaatgataaaatcgatgatgtttaaaatgcgtcagttatttttaataacgattgatacccgtatttctacaatctgtataaatgactcaagcttcgcatcttatgaattccctgaagtgctaaacctaagcaaagtaatgaactatcttaaggaagaaagttgagttagctaatcgcatatattttattgaaaggatgtgattgaattatggaacggccgaattggggaattggaggattagtattcgttggctgtatgtttcttggtggaggagtgggatctatgttaggtaatgcccaaactggatggctaataggaatgggcgctggatttcttggtatggctttaacgagactgttcagaaaataatgtaactgagattcttcttctggtaaataaggaaatatgtaagtaagtcatggcataagagttctataaattatagttagaatcttctcttttgtatttgtcttttctaaatttctccatacatagatataattctcaagtcggaggatggcaccttagggtgtcttttttatgctctttaaaaatgtcttaccattataatagctgagttttgctttcagtctccgatgtccattaagcataaaataaaaattctgcaccatttaaactctgataacaattcatacgatcaagaataattgagttaatagctttcggtagatcgccatcatttttttataatagattagattcattgccgtttcagacctatgtatgaattcataatctaatagtaaaaggaggaatgattaaaggtatggcggttaatgaggaatcaatttgtcaacagtttgcaagaatcattggcggtcaagaaggattcgctggtgggaaatgcgtggcaacaataaaccgagatgaaatacgagcaacaatcttgggaaaacgttttagagtaacaacttccttttcattcgaatcacgagacaataaaactggacgggcattatgcctaggccgagtagcactcttacaaaaagaagtcactgaatttgtggcgacaattattaaacaaggaataatcgtttcgtctatacacaatgagtggttatgtgatgatccaaatttaatttacgttaatatcgaagacgttgatgacccactaaattttgcaagaaaagtgagaagagcgttatgcacgtaatcaatttctttagttaaacgagtgattatattaaattgaaaagttcagcgtgttggatggttttataaaacgaaagaaggcgtttcatatttggaatgccttttctttatgtgttcgttactaatgtgggtggttaactgattatatgctgtttatcttgcaacagcaagaactggacgaggtatctttaaagatgtttgactgtctatagataccatattttatcaaatgttattagcatatcataaaacgataagggagaaatcgccttcataccaaccaatcaaaatcttgaggtactattctttatgttgtaaggttccactattattttcatcaattactcaacgtattgcttcgatgttttctggagtcattttaataaatccttgcttttcatgagataatactttttgatgagtcattttgtgcatggcattgattatatgacgattagaattgaggtcaagtattacctcttcacctttaattctatcagtctgcttttccttaactcctgattatattagcttcaataacatatgatcattcttaagaatgtcattgaaatgtacgaatagatgttagtgcagcaaaataaattgtgttatgatatgaggaaatataaagctatgtaacggagggaataacatgccgcatgttgtgtttcgtggaattactactgaacaattaaaaagcataagcaagccattagtagaagaactcgcagatatctgtgagtgtggtacggataatttcaccttggaattaccaagttctacgtttgtattcaatggagaagaaatagaagcgtttcctcttattgaagtgaaatggttcgagcgtggacaggaaattcgtgatcgatttgccaaggccattactacatatgtaatggattttggacttccagaagtagaggttgtatttacagttttcacagaatcagcgtattatattaacgggaagcattgtgcaagttagagctattagaaagatttttattcctataataaaatatgtttcgttaaaaacaagggccggaattccggctccttttctatcccgcaaaataaagtcttactttatctctccgtctcaaaaaactcaatccactctccatcagggccagcgaagaatatgtaacgtgttccatctggtaatgtttcaatttcttctcctagtaaaaaggttactttttgtttctttagtctttcgatctcatcctctaatgaatccactttaaagcaaatgtgatgtacttttccttctgccggaagagaagagttgtagccttcaatgagttctagtatcgtttcttttgattcttctacacctaaaaaagcgagttttaagtctggattcggatgacccatacgtttcatgagctgtaagccgactacttcttcataaaatgaaatagatgtttctaagtttgcaaccataagtccaacgtgttcaattcttctaactggcatgtagattccttctttctgaaaattatatacaatatattattgaaaattaagaaaataagcaagataaaaaccttacaaattttagcgtgttatatggtatagtgagaaagtatgtttggggagaaggaaggagattatacgatgaatacaactactcaaactccttcattatcggaaacgatgaaagagtggcattatgcattagcgtatgaaattaaacattggaaaacgataggtggtagtaaaattgctatcatgaacggtcgttttttatatacagattatgaaagtacagtatacgtatttcagcttatttcggaagtaagcttacctgaaggttcacccattcgaattgagttcgatggtgaggaagcgacaggggaagtattatctatacatggattagaaatagagctgaaattaaatgattatatacaaggtgaaataagagaagcggttttatatagtgaaccgtggcaattgttagagcaactacaagagcgattgaaagaagcacgtaaagataagctgaaacgtaatcgtataaagcgtcttgttgatgggacgagcagtccgaaacatattgagaagatgaaaaatccaaaaaatgaactggcatatcgttcgttttataatccgacaacgtacgtatggggaccgccgggaacagggaagtcttacaatttatcacgtattatttcggctcattatcaaaaaggaaaatcggtacttgtgttggctcatagtaatgcggcagtagacgtattaatgagtgaagtaacgaagcaaattgagaagaaaaagaaatggacgcctggtgaaattgttcgttacggttatagtcaacatgaacatatacgaaatcatgaaacgttacttgcgtcgaagttagttgaaacgacgaacggatcttggggggaggaaagactctatttagaagagacacgacaagatcttcgtgaaaaaatcttatcgtataaagcaacatctgctgataagaagcgtatacaagagattgaaagtgatcttcgaaagcaaaaggctaaaattaaagaagtagaaaaagaatatattgaaaatgcaaaagtaatcggcgcaactttatcaaaatgtgccattgattcacttatttatgagcgtacatttgatttagttgttgtagatgaagtaagtatggcatatgttccgcaaattgcattagctgcttcacttggaaaacgtatcgtcgtttgcggtgactttttacagttacctccaattgcgatggcaaatcatgaactcgttcgtaaatggcttggggaagatatgttttaccatgctgggattgttgagtctgttaataaatcagaagcacacccaaacctatttatgttgcaggaacaaagacgtatgcatgcggatatatcgaagtttacgaattcgtttatttataaaaatagagtacacgatcatccgtctgtttcagagcgtaaagaacttgcgcaattgcagccgttcgcaaatgaagcgagtgttttatttgatacgagccaaatgggagctttttcgttaaaagatgctgcttctggttcacgttttaacattatgtctggtttagtagcaatgcaaatgatgttaatcggattgttagatggtgtgcaatcaattggtattgtgacaccttacagggcgcagtcacgctttttatcaacgtgtattagagaaatgttgcagagaacgaaatatcaaaacataccagttttagcggcgacagttcataagttccaaggttctgaaagagatatgatgatctttgatacggttgacagttatccgcaagaacgacctggcatattattctttgatcacaaaaaccatcgcctcgtcaatgtagcagtgacaagggcgagagggaagttcattcaattatctgattgccattatatgtgtaaaaacctttcgagaaaacaagcgttatcacaattaacagctcatatagaacgtcacggagatgtgtatgatcgtacgacatcaagacaattgtgggaacggaaaatttcgaaacgtttacgctggtttatggaaatgaatcttgaggaaacgaaaggggtattaaaagatattttagcctcaaaacgaaaaattattatttcacttccaagtacaaaacaagtggataagcgagtatggcaagcgttaatgcgtacaaatgcgcaaataacagtttatagtgatggaccagttccactgaaaaatgtaaagttacaaagacaaaataaagcattcccgtttatcgtaattgatgatgaaatcttctgggcaggcgcaccgcttacatctcaaatgatgtttgaaggtagtacggaatttccgtacgtatgtgcaagactgcaagcacctgagacaattggtgtattaaaaggatttttagatattcggtaaattcggataggaattccttgacttttacttggaatgaacttagaataaaaaataatttaatataattttatgaaaattcttatcacgagaggtggagggactggccctatgatacctcggcagcggattcgttaggaatactgtgccaattccagcaaggtaacttgaaagataagaaagaagctcattttgactgtatatacagaagcctctttctatcttttagaaagaggcttttttatgtgaaaataaaaggaggaagaacaatgggagcgacaggagtagcgtcacaaagaaaaacaattgaagagagtatcgaaagaaataaggaaaagtacatagaaacaagtcatgatattcatgcgaatccggaaattggtaaccaagagttttatgcatctagaacgttaagtttattgctaggcagtgcaggatttcagttgcagcacaatatagctggacatgaaacgggatttatcgcgcgaaaaagctctggaaaacaaggacctgcaatcgcatttctagcggagtacgacgctttaccaggactaggtcatgcgtgtggtcacaatttaattggcacaattagcgttgcagcagcaatcgcattatcagaaacgcttgaagaaattggcggggaagttgtcgtgtttggtacgccagcagaagaaggcgggccaaatggtagcgcgaaatcaagttatgtaaaggcaggtttatttaaagacattgatgcggcgcttatgattcatccgagcggaaagacagcgacaacgagtccttcactagcagtcgatccacttgattttcatttttacggaaaaacagctcacgctgcagcttcgccagaagaagggattaacgcattagatgcggttattcagctctataacggtattaacgcacttcgccaacaacttccgtcagatgtgaaaattcatggcattattactgagggcggaaaagcacctaatattattcctgactatgccgcaacaagattcttcatccgtgcagcaacgcgaaaaagatgtgcagaagtaacagaaaaagtaaaaaatatcgcacagggagcagcattagcaacaggtgcaaaagtaaaaatccatcaatttcaaaatgaaatcgatgaattactcgtaacaaaaacatataacgatatcgtagcggaagaactagaactattaggtgaagatgtaaatcgtaaagaaagagtagggattggttcaaccgacgcaggaaacgtaagtcaagtcgtaccgacaattcatccgtacattaaaatcggaccagatgatttaattgcacatacgaatgaatttagagaagcagcacgttcagaacttggagataaagcattaattacatcggcaaaagcattagcaaatacggcgtatcgattaattacggaagaagggttgttagagaaggtgaaggaggagtttagagaggcgcagaggaatcaggggtaaggggattaaggtgcttttttcgaatagagatctaattcataagtagagatataaaaaagaacattgaaatatcaatgttctttttttgtttactaatcattgatttcattggcttttctcataaaggaaaaacttttactgttagccggggataatacgtatccctttattagaacgacaatttctcctcaaactcactctttaaaacaattaaaggagacgataatccaaattgcattaaagagtctaaaaatgtagcgagagaatccatcgaatcgctcatgaccttcatcatataattaaattccccgctaattcggtataaatctgttacttcaggagcggcattacaaaattgaataaaatcagagcattggctcgttttaaacatgatgaatgcttgaatgtttttattaatttttgcaggctcaaatttcgttcgataagccgctataactccttgatcttcaagcttgttaatacgttcttttacagcaggttgcgtcatggatataattcgtcctatttctgaaacagaaattctcgcattttcatataacaggttcataattttatgatcgatttcatccaattttacagcgttttgcattgtgtagcctccttgttatgttttctaaagtgaattgtaaattataactataatatcataagtgaacgaactaaattacctataaatctatatttaaaatgattagtatttgcatgaaaatataagtatagggtttatcaaaagggaatttaggaaggatggaaaaaatgaagaatcttgatgggaaagtagcattagtaacaggggcaagtcgcggcattggtcgtgcgattgcgatgagattggcaaacgacggtgcattagttgcgattcactacggccgaaataaaatagttgcagatgaaacaattagtgagattgaatctaatggaggaaaggcattcttaattgaagctgatctcaatttaatggatggtgtcaaaaaaatagtagaacaattgaagaatgaattacaaataagagttggtacatcagagattgatattttagtaaacaatgcagggataggtacacaagggacgattgaaaatacgacagaagaagtttttgatgaaattatggccgtaaatattaaggcgccattctttttaattcagcaaacattaccgttactacgagtagaagggcgcgttattaacatttcatcagcggaagtaagacttggttttacagggtccattgcatacggtttaagtaaaggtgcactaaatacgatgacacttcctctagctaaacatcttggagaacgaggtataacagtgaatacaattatgcctggatatacgaagacagatatcaatgcgaaattgctagatgattcagaaatacggaattttgctacggattcatctgtgttcggacgaatagggcaagttgaagatattgcagatgtagtagcattccttgcttcttctgatagccgctgggtaacagggcagattatagatgtctctggagggttttgtttataggggcactactccataaccagcaagctaattaagtaaattactagttatgaaacgatcctcgtttcataactagtaatctatagaaaggtagagatgataaagaaatctattaaaacgtgattttttcgctaggcaatttgaataagggggctatttttaattattcataatctaaaataatccaattttattttacagtaacattaaaacaaaattattgaccgcatggtacaaaaagggtattctattcatattatctttaaaatgagaggaggatacgattgaataaacgcggcagacctcgagagtttgattattcctcaattgtagatgttgcaatgaaaacattttggttaagaggatatgaaggatgttctacacaagatttatgcagtgatacaggacttggaaaaggaagtttatacaatactttcggtagtaaacatgaactgtataaacaagtattagaacgctaccatgaaattgggattagggaacaaaagaaattgttacatactccaattccagttaaagaacgattaagtaatttttttgaatgggcattgaaagaagactttgagaatatggatcaaaaaggatgtttattgattaatgccagtatagaacgtgctaaaaacgatttaatggtacaagaaattttctcgaagcatgttgaacttcttaaacaagctattgaaacagtgatggaggaaggattgcaaacaggtgaaatttcaaagaagcaatcagctgaagaattagctagtctgcttttaagcagttattacggattccgtgttcttaatgtatcgatgcaaaatcggatgttgtctgaacaagttatcaaaggaacagtagagtctatttgtggcgcttagtgcgcccttttttcgcactatttttgtaccgatcattacagtaatggataaggagtgtttttatgccatcgattatttatttattagctttagcaatcttttgtatgactacatcagaatttatggttgcaggtatgatgaatgaacttgctcttgcattccaggtttctgtatcatccattgggtatttaatttcagcttatgcaggagcaatggtaataggaggccccattttaactgcaatcctcttacgaatgcgcagcaaacaagcattattgtttttaatgttcatatttttaattggtcaatcgctcggagctattgcttggaactatgatattatgatgatttcacgtattataactggtattgcttcagcttcagcttttggagttgcgatttccttttctgcgacattggttcactctgattcaaggggaaaagctgcatcaattgtacttgcaggtttaatgttcgcaactgtattaggtttacctataacaaccgttatttcgcaatattttggctggcgtattagttttggggctgtttctgttcttgtgctagtatcagcaattatgattcaacggttgttaccatcctcttcaaataaagagcaattaaattggaaagatgaacttctgcgatttaagaatattcatctttgggcagcgtacgtaacaagtatgttcattattggtggtacgtttgccgcatttagttatttcactcctatctttacaaatgttacagggttttcaagagcaagtattccatatttacttgctctctatggtagcgcgacagtaattgggaatataataattggcaagttcgctgataaatttacaatgaaaatacttatgggtggattaattatattaatcatagcgttgtctttatttgctttaagtgcagagaataaatacattgcagttatttctacgatttttattggtttaactggtgtagcattgaatccagctatggttgcgagggtgatgaagacagctagtaatggaataatgataaataccgttcatagttcttttattacgctaggtattgttattggttcgtcactaggtggtcttgggatcagtaaaggatatggttttgtatctccgctatggattggagcttgtttagctatccttggggtaatttcgttattcccatatttacataaaggaaaggcagattaagatgtttaaaatttctttatatgaggtactgccacattaccatcaagctaatactttcatatccccctaaattaaatttttctttctctacagatagctattctgagaagccgctcattttttcgttttgggggcatttctttttcttaagttgatgggcatagggtaccgccccacaaccatcaacttaaggattaaaactatttttgtaattaaaagcatgttactattctcattaacataagagaatagtaacgtgctttttatgaatatgcaccaaaaacaagagttatatcaatttttctcattttggggtatttgtttttcttagattgatggtgatggggcactactctataatgatcaaattaaaatttaaaatagttatagagactccatttctcggaaatattgtaactattaagttgtaaaaaaagccgtagtttttcatttttgaaaaggctggggtcctttttagttgtagcaaagatataatgggaggaagtttttctaaatcacaaaaaattgattaataagttgtataataaactcaatagcgtatatactataagcatcaaaaaaagttgatgaagggaagtgaactacagtgacacaagattttaagttatatgagaaaaagtttaaagcgttggctgatcagaagcgtttagagattatgtatgaactttgccagcgaggccagacttgcgtatgtgatttaacagagatttttgaaatgacgcaatctaagttgtcatatcatttaaagattttattagatgcaggtttaattgtaaaagaaacaaaaggcacgtggagttattatgatctaaatgatgcggaagtaaataatttattatcagaagaattatgttgtatctttagaaaaacaggaaagggtagctgttgttaaaattttgcactattaatcaaaaaaaattgattaataacatataaagaggaggaataagctatgatatatgttcacgttggtataaacgttacgaatttagagaagtctattgaattttacgaaaaggtatttggtgtgtcaccagttaaggtgaaagtagattatgcaaaatttttattagagacgccaggacttaatttcacgctaaacgtacgagatgaagtgaatggaaatcaagtaaatcactttggttttcaagtggatacagctgaagaaattacattacataaagaacgattagaaaaagaaggtttctttgcgcgtgatgagatggatacgacttgttgctatgcagtacaagataagttttgggtaacggatcccgatggtaatgagtgggagttcttttatacaaaagcagatagtgatgttcacaaaatagaagatccatcttgttgtacgacttctaaagtagtagaaaaaaattcttgttgttaataggagctggaaaataaaatgaaacgtttatcttttctagaccgctatttaacactatggatctttctagcgatggctgttgggattggtttagggtttgtgtttcctagtgtagtagacggactacatacattacaagttggaacgacgtctattccacttgctgttggtttaattgtaatgatgtatccaccattagcgaaagttcgctatgaggaaatgggccgagtatttaaagatgtaaaagtgttagttctatctttagtacaaaactggattatcggtccggtacttatgtttgtgttagcaattatttttcttcctgataaaccagaatacatggttggtctcattatgattggattagcacgttgtattgcaatggttattgtttggaacgatcttgctgatggggataaagagtatgcggcaggtttagttgcttttaattcggtattccaaatgctttttttctcagtttatgcatacgtatttgtaactgtaattccagaatggttagggattgaaggggctattgtcgatattacaatgatagaagtagcaaaatcagtatttatctatttgggaattccttttatagcaggtatgttgacacgctttgtactagttaagttaaaaggaagacagtggtatgaaaaggtgtttatacctaaaattagtccacttacattacttgcattgctatttacgatcgtcattatgttttctttaaaaggagagatgattgttagcgtgccactagatgtggtaagaatagcgattccgttattaatctattttattgtaatgttttttgtatctttctttatgggaagaaaaattggtgcaaactatccggtgacgacaacgttagcatttacagcaggtagtaataactttgagttagcaattgctgtagcagttggggtgtttggtattcattcaggcgcagcatttgcagcagttatcggaccattagttgaagtacctgtaatgattgcacttgtaaacgtcgctttttggtttaagcgtaaatattttaatgatcaaccagcataatttaaaaacaaaggcggaaaacaacatggaaaacaaaaagacaatctatttcttatgcacaggaaattcatgccgaagccaaatggcagaagcatggggcaaacaatatttaggtgataaatggaatgtatattctgcaggaattgaagcacatggagtaaatccaaatgcaattaaagcaatgaacgaagtaaatatcgacataacaaatcaaacatcagatataattgatgcaaacattttaaatagtgctgatttagtcgttacgctgtgtagtcatgcggattctgtttgtccatctactccgccgcatgtaaatcgtgttcattggggatttgatgatccagcaggaaaagagtggtccgaatttcaacgtgttcgtgatgaaattggtgaacgtataaagcgattttctgaaacaggggagtaaataaaggaaagagtcaatcttctatcttataggggattggctcttttttattatgtatttcatttacttatcgcatcgctttaaaaccactcttgaaaataatacagaatattatgtgaaagtggtaaagttagaatagaacagtttaaaaaaggggatgtaacgtatgatctgtgaactaagcaagaatgatttttataggtgtaatagtttagtgaatgaacaaggtcaattagaggtacgtgctgtaattgcaggagtgaaccctggtcgtatatttgtagataatagtactgctcctaattcgggacttatttggttaggtaataatgatggattcttcttcattggagattctgcaaatgaagagtttaataaagaaatgaatcattttattaataatgtaatagtacctgaggcgaggaaggtaggactagattgctttgaaggaatcggtaatcattcaaaatggaacaaaacaattgaaagaatatttcagcaccgtaaattaaagagttggaatcaaagagtgtatacgctaagaaaagaggattatgacaatcatcatgagcctaaatttgaacagggatatactgtgctgaaaatgagtaaagctctctatgaaaataataacaatacatttaagaatattgattttttacaatcaaaaattttagagttttggtcttcaccggattgttttttcgatgagggaatcggttattgcgttgtttatgatgatctaattgtaagtgtatgtttttcaggttttgtatttgcaaatatccattgtatagatattgaaacgataaaaggtcaccaagggagaaaattagctcaaaagatagcgcatagttttgtgaaagattgtttggagaatgatattattccatattgggactgtatggaattgaacaagccttctgttgcagttgtggaaaatgtagggtttacaaatgtatttaactatgtgggatattattttttatttgaataatctaggtatactttacaatttacactttgaggttgcccaatcattatatatatctacaatttaaaaaagaaagcatatgaggtgtccgaaaatgaaaatacaaatagtattgtttgatggtttcggagaacttgtctctttcgcaccgtttgaggtactgaaaagagcgatagaagaaggggctccatttacaattgaattcgtttcgagtgaacaaaaacaagaagttacgacttcatttggagttacggttaaactacatgattttttacgaatggataataggccagatttgttaattgtacctggtggtggctggaatcataaagcagagcatggggcacgaaagcaagcagagcttggtactttgaccgaaatgattagcgagatgcacaatgcaggaacaattgttgctggtgtgtgtacaggaggtatgctattagctgcctctggtatattgaacggtcgaaaggcaacgatgcactatttggcacaggatgaaatgagtgaatacggggcagagcttcttcattacagaattgcggatcaaggggatattatcactgcaagaggagttacttcaggagttgatttgggactttggatcacggaaagattcgcaagccctaaaattgcggctgccgttgaatacagaatggaatatgagaggcgaggtgttgtttggaagtaatttgacttcttttttatcccgcattaacgggcagtaagactcccaccacaaaattcaacgaatgggagggctgcccgtaaaaaaacaatggatatgtactaataatcagtgggggtgacaaaattcctactgattaaagtttcattttataatttttcaccttattaaaagttgatttgttagaaaggataatcatttattgatataatgaatggatgcgtggcaggaaatagatagaaagatactgctagtaatttatacttaaaatgtagggagattgaacagagttatggggacagaaaaagaaattagttccgctaaattaatatggaagatgacgcgcccgcatacattaacggcgacgttttctcctgtaattttaggaacagtggcatcactttatgttgccaaaattgattggctgttatttattgcgatgatggttgcatgtttagcattgcaaatagcaacgaacttatttaatgagtactatgattttaaacgtggattagacactgctgaatccgttggcatcggtggcggaattgtccgtcatggattgaagccaaaaaatgttttaacagttgcgcttttattgtatgtcgtagcagcttttattggcatttatatttgtatgaatagtagttggtggttagtggttattggtttaattgggatggcagttggctatttatatacaggtggtccactaccaattgcgtacaccccgtttggagaattagtttctggattgttaatggggacatgttttgtactcattgctttctttattcaaacgaatacgataacgattgaaagtgtattgatttccattccaattggaattttagtcggtgcaatcaatatgtcgaataacatcagagatatcgaagaagatattaaaggtggaagaaagacattagtaatcctccttgggagagagaaagctgtggtaacactagcggtagcctttttcattgcgtatttatggattgccgtaattgtattaatgggttatataagcccttgggcattagttatgttcctaggtttgagaaagccgatttctgcgattcaaagtttccaaaaaggggcaaaggatcctgggtatatgcgcatcgcaatgaaatcaacagcgatgacaaatacgatttttggcttcttattatcagcagggttattaattagttatttgttttaaataaaaaatatggttaaataacttaaccccagtttctcaattttaatatagagaaattggggtttttattttgactttgtttaatgttaaaaacagtttcatttgaaatgcaaataccaataaattgcaacttcatcattttcaatatccaaacctttataaacaagaaaatcacacccaccaattacaaatccgcatttttcatagaacttacatgctgcgacattattattttgcgtttcaagcatgatacctggcatattgcctttttttgcccactgctttgcttgatcaactaatcttttaccaactccgagtgtacgatattttttatctaccgttatatcttctatgtaagcatagtggttccaattctttttcaataccattaatccaatgatttggttatgtaacagtgctatgtaaatgacttgattaggtttatttatatattcattgtaagccagttcttcattatcatcttgattttgtaaataacttttttcataactcggaacgtcttctactgtatattctatacgtttatttcctttggaaagagaaagaattaaccgagcattcactataaaactgtcatcaatctccgggagattatctaaatcatttgtttctaactctctaattacaaggttcatcggggcacctccacataataatatttcttctagttcttcatttggttcaaatgaattccaattacaaaattataatagaatttcaatagtacggctatctttgtattttatctttataccagcatgttgttatcttgatatgaaaatattgtttagaaagagtagtatcttttattttggatgtatatccagttttcaaatttaactgtagtagagaaacaaatatttttttaaagagtggatgccatacgttattctttaactaaattcgacattatctgcattttatcttcaccttcctctattaatctatttattgtaaacatcagctggagttaatgctcagctgtataaataatgaatataaaaattaatagggaaaggatcgaaaaataatgaaagaatcacaaagtaagaaaaaaacaagtcgactaactaaggtaataatatctctaggagttgttttagcaacgacctttttcaccttctttttaataggaaaatggaactctatcccagcgaagggaatagctaacgaaagtagtaatcaagttaacacgcaacaacaagaaaagaaaaaagaaacaccaccagcaaaacagaaaagacctgatggaaaaccggtgggaaaggttgtttatttaacattcgatgatggtcctagcgaactaactgggaaatttttagatgtactaaaagagcaaaatgtcgcctcgacattttttatgcaaggtagcaatttacaaaatacaggttttcaggaaaacgtaaagcgagcagtaaaagaagggcattatattggtgcacatagtatgacacataatagtgataagctatacaaaaaaggacaatttgtaacggagatgaaagaaacgttagctcttattcataatattacgggtacaactcctaaattagttcgtccgccatatggatctgcaccaggattaaagggcgaggaaattcgtaaccaaattgtagaagcagcaataaaagtttgggattggacaatagactcaaatgattggaaattaaaagataatccaactcagattatcgataatgtaaagaaacagacaacagaagaagtagaagttgttttaatgcatgaaaaggcgcaaacattacaagctcttcctgaaattattaaattttataaagagaaagggtatgaatttggtgtatataatgacgaggatcattttcgtctaaacttccaaaaagatcaacgtctatagtataaacatagttattttaaaaggtgtttttattactaaatcaataattaagcaaaagtcgatttcctattttataaagaaatcgactctttcgtttatgtattatgtcacaagagtttccttattttctccggaatgtcctttttagaaatctatgcaacagagcctttatagtaagagtatcttgttgggaatgatcaaaaaaatctatattgtaatataaaaaatcgctatgatatgaaaggataccatacaacaatcccaataaattcttctcaataattgaaaataaaatcaatccggattattatattgttattgtaaatttattttattgaaggaggatacatagatgaaaagctcaaaaggctctattgaatcagagataagcaaagcaattactcactgggaaaaggactacctaggacgcgggtctatatccgttaagacagatatattacgggatatgattatcgtaaatttacaaggtgttttaacgccggctgaatatagtgtttgcgaaacaaaagacgggatgctaacgataaagaagaatcgttcggagctagttgaatctggaattgatgatctgaaagagattatactagaattaactggagagaaagtgaaaagctttcatacggatataagctcccgtacaggtgaacgagtaatgatttttaaattgcttcataatcttgaggagaaattttaaaaataccttaaggttagtggaaggattaagaaacctacaagttttacactttattaacaggctaataattaaaaacttgaagttatttaggtataataaatcttaattctgataactcttaaaaaacggataaagaaattgacaaactgcttaatatggtttatcttataattgttttaaaaaattgatagatgctcattttaacagtttgctataattaaggctttagcatttttttaatatgtaatattgactaaatgaaaaagtttcttaattaaaagatagcgtataacataaattgatatattgattgcataatctaggagatcagaaatatacatttctttttaataggagtaatacatacattattatcctctataaaatgggagctcttcaaaaaactttattgaagttagttgaagggaaaccgacaatctccataattcaatgatgatataaaatcattgaattatggaagttgtcggttttttttatgggaaaaaacgatgcactaaaaagagtgaatgaaaattgaaatttaaaaaactatcgtaattaaaaggaatttttataggttattttcgcttagaagggagtatttaacatgttaatttcgctgagttcatcaacactgttaactttattttttatggcgcttagtgcttcttggctaagtggattattgtttttacatgcaaggatacctttacgttttgttcatatccatattggtatcgctgctttaccttcattggtttctttgctcgcacttgttaataacaatggagatagagttgtggggccttggcatctagatactttagcttggttaatggctttctttgttcttacaattggtttaatcattcagcgtttttctgtacgttacttaatgggagatcgctcatatcgaaaatactttgtactttttacatttactacaggtgtatcttcggttgcatggttaagtgatgatcttcgtttcatgattatttgttggggagcaacgcttataggattggttctactcatagggctaaataaagggtggaaagtagttagtgaagcaactaaaatctctggctatttatttacaataagttggattgcattgctatcagctatcatttggctttttcaagtaactggacagtggcaattaacatcagttttaacgaatgaaaatgtagcgctacatggaacattggagagaacaggaattaacttattaattatattagcggtgatgattccagcagcacaatggccttttcaaagatggttaattgagtccgctgttgctccaactcctgtttctgctattatgcatgcgggtttagtaaatgctggcggtatcatgttaactagattttcacctctttttcatgatgatattgcacaaataattttactaattttctctagtatttctgtcttgataggtacaggaattagtttagtccaagttgattataaacgtcagctagtaggttcaactattgcacaaatgggatttatgcttattcaatgtgcattaggcgcctatttagcggctgttattcatttaattttacatggtttgtttaaagctacactgtttttacaagctggttcttcagtgcaacgttttggggtagtgaatcagtctaatgaaaagatgtccaatttatggattagagtcgggcgtgttttaggattatttatagcaattactttctggtttatgacttctggagaggggtatcaactagttagtgcgttaatcttaggctggtcactatacttttcatggaaacagcttgttgtttttggagagggaagaatgggacgaattgctggcgtaattgttttgattggattttctctcatttactttaccgttcataattctctttataaatggttgcatactgatatttatcaaagtgttcaaccttcagctccagccgttatctttgttatatgtattttactatttagtagtgttactagtactttcgttactcgtcatcaatcttctactttattcgctgtactttatctttggttagttcgagtaggtgaggcgagaagaaaatcagtagaaagtcacccaagctatctgaaacattatgtatcaaagggaggtaattcgtgatgagcatatcgtcaatattaaagaaagatacaaacattgatatgcaagaaaataatataaatgatttagttgcatctgctagccgagttattgcaccactttggcctatctctacgtttgcagctcaccacccttggatgggacttgaaaagcaatcatttgaacaagtcgcaaattggctaaaagaagctcgtaatgtggatatgtatcctagtacttccatgattcattcggcaaaagcgaaaggtgagattgaggaatcatttttacaaagtagtttgtctcgttggctggattcacaatcttttcatattccgcgagagaaagtagagcgattttgccaagcggctttaaagttagaaaaattaccttctagtctattatcatcgccagaattaaataaattggcagaagaaatgagttatataaatacagcaaatatgaaagcctctgttatgcagccaataagttcgcttatagagaatcaaaatagtgaaaacctatctgatattcttaattatcatatcattaaatggtgtaaattatatcttgatgactccggatcaagttggacgatgccaaatcgagagaaaggtttttatcgtgcatggcaacaccttattacatttgatccagcgctcagtaaaaatgagcgtaaagttttaaaagattggccacaagatgccgaagtagctttagcgagagcgttatttgaactaggaatttctgaatctaacatacaagcttatcttgaagggcacttactttctttacctgggtgggcaggaatgatacgatggcgctcacaacaatcaattcaggaacaggggcttttaatagaatatttagcagttcgaatttctatggagctggctattgcaaaaccttatttatctttaaaaaatcaaaaggttgagaaaaaagtttcgatcgtcccacttatagcttcttggatctattgggggaatatttcaacacgggaatggtcacaaatgtctgcagctgaacaaagcgaattgttagcatttgcatatcgttttgatgaaaatattcgcaggaaactttggctggaagcttgggaacaaacgcatgcagagcaattaagagagaagattgcttctaaacaacgcgcaaccaatgataaaaagcgtgtattagctcaattagcattttgtattgatgtacgttcagaaccgtttcgtcgccacttagaaaaactaggtccgtttgaaacgtttggaatagctggtttctttgggttaccaattgcgactagtgaactaggtagtaatgacagccatccttccttgccagttatactgaaaccgaagcatcaaataaaagagcttacagatgaaaatgaatttaaatcttatgagcaacgtaagagggtaggcagttcggtgcgttatacatttaaaacgatgaaacagaacgtactgacaagtatggcgctacctgagttaagtggtcctttacttggtctacagatggtgacaagaagctttgtcccaagaggagttggtggtttcattcgtaaacttcgtaaaactatgttacaaaaacctgatacaacattctcgcttaatcatgttcatgacacaaaaggtgagatacctatcggttttacgaaagaagaaaaagtgaactatgtgcgtcaagctttaaaaatggtgggactgacagaaaaatttgctcctttagttgtaatgtgcggacatagtagtcaaagtacgaacaacccttatgctgcagcacttgagtgtggtgcttgtggcggagcagcaggaggattcaatgcaagagtttttgcgactttatgtaatcttccagaagtgagagaggcgttgtttgctgaaggcattaacattcctaaggataccatttttgcagcagctgaacataaaacaacagtggacgaattggaatggatttacgtcccagaactttcgaaaactgcgcaagaagcgtttgattgtatcgagacgattatgccaaatgtgagccaacatgcaaatagagaacgtttaacgcaattacctaattttaaaacgaaaataaaaaatccgagtaaagaggcacatcgatttgcagaagattggagtgaaatacgtccagaatggggattagcgcgtaatgcatcttttattatcggacagcgtgaattaactcaagattgtgacttagaaggcagggctttccttcataattatgattggaaacaggatgaaagtggcgatatattagctaacattattgcaggaccaggaacagttgcacagtggataaatctacaatattacgcatcaactgtagctcctcattattatggtagtggaaataaaacaacccaaaccgtaacggcgggtctcggtgttatgcaagggaatgctagtgacctgttgccaggcttaccttggcaatcggttatgcagtcagatagtgagacgtatcattcaccacttcgtttactaattgtcattcaagcacctattgaatatatagaacgtttgttaaataatgatttcacatttcgagaaaaagttcaaaatggatgggttagacttgcaagtgttgatccagagggaagctggaaaaactggtaacaattattattgttactagcttaaaagtttcataaatacaataatgaagaaggagtgctccatatgaattcaaagaataaaaaagttttattattaacagacattgaacacggaatagagcctagtatccaacaagtaactaacattcaacaagaaaacatgttgactatacacagctatgattctgtaattgtacatccttatggagatataatgagatctattattattgctatttatcaagaaaatgttaaagaaatttttgttgtcggaatagaggataaagaaacttcttcagttaatctacaaactcaacgtgatttcataaaagataatatagaattagactatctctttaaaaattgcatgcctgaattttcaagtggtagccttaatcaatggctgagtgcacaaaaaaatgttagtgaaaatattgaaaagagtatagatatgatccgtcatcatccattagtaccttctgatattgaagttcatggtttcataattgatagaacgggtgaaaaagaaacggttgttaaagtttttgctaataaagtactgaaacaaatgcattcttatgtgtaagttatcgatagataagcaacttttatttggacttgtgtcctttacaaagagcaaaagaaatcttctataaatggggatcttttgctctttttgtttgaatttttaatgtgttttataggagatacctaatatgtacataataaaaatatataactttttgcataaaattttaaggacggattagcaggtgataataaagttaatcgtaaaatagaagtgtatattgtgattgatcccgcattaacgggcagccctattggtgagggctgattaaagtttcactttattttaagattattactaaaaagaatggagattctttaattatgagaataaaacagttaaaacctaaagtgatatggaaaaaaagaatgttgctaactctttttattgttttcggattgattattgcgggggttgttttttggaatgtttcacctattccgaaagcgtttctcataaaaaaagcatttgaaggtggaatgtttgttcaatctaataattataaaaacgctctaaaagagacacgaattgttaaagatatcaattataattctaaatttcctgatggtacattagacattatttatcccaaaaattttatagggaaaacacctgttattttttgggtgcacgggggtggatttgtaggtggagataaatcagacattactggttatgcagtagaattagctgctcgtggttatacagtgataaatataaattatgctcttgctcctaaaagaaagtatcctacaccagtactacaacttggtgaggcttatgaatatataaaagcaaatgcaaagaaatataatgtaaaactagatgacctatattttgcaggagattctgcgggagcgcaaatatctggacaatttgttactattcaaacatctccagattatgcgaaattaaccgggattgacgctgttgttgctccttctacaattaaaggtatattgctattttgcggcccgtataatatgcctgcattagctaaaatggaaacatccaaagaagtgcaagactttatgcgtactactggctgggcttactttgggaaaaagaaatttgaaacattacctgaaatggaaatcgcctctatttataaacacgttacaaaagattacccaccaacgttcatcacagatggaaatactgcatcatttgaagagcaaggtaaagcattagcttctactttacaaaataaaggagtacctgtagatacacttttctttgataaaaatatctctggcgagttagcacatgaatttcaatttaaaatgaacactccagcaggtgaagaagcttttaaccaagttcttaaatttctaaatgaaaataaataatatatatactattaactttttataagcctagtttaataccatataggggtgaacaaaatattgcattaataatctaatggtagcaaaaataaatttgataagaagtatatagtaagaatgatttggagatacagatggggatataactattttatttaggacggtgcactttaaatggatttacagaaagggaaattatattggaacacaactttttctaatacatcttcttatcctcgcttggaagaagatataaaatgtgacgtactaataataggagcaggaagttcaggtgctcaatcagcatactatttgagtgaatcagatttaaatattgttgtcgttgataaaagaaaggtaggacacgggagtaaccttacaaatacagcacttattcaatatttaggtgacaagatgttttttgaacttgtaaatacatttggagaagagtatgcagttaagcatatgaaattatgtgaacaagctattaatgatattgaatatgctgatcaaaacttgccttattgctctgattttaaacgacgtgacagtttatattatgcaagttatgaagaggatataaagaaattagaaaaagaactgtattatttacataagcatgattttaaagcgacttggctatcagaggaacaaattggacagagatatccatttaaaaaacgtgcagctatttatacgtataatgatggtgaaataaatccttataaatttacacatagtttattagaacaagctgctaataaaggagttcaaatttatgaagatacagagattgttggcaaaaagttagagaaagaatgtgctatcttttatacaaaggggggcaattctattactgccaataaagtaattgtggctgcaggatatgaagggttggaatttaaaaaggaaaagaacgctacactgattagctcatatgcagttgttactaatcctgtagaagatttatcttcttggtataaacgtactctcatttgggaaactgcgagaccatatatttatatgagaactactgcagataacaggattattataggtgggttagatgaagatacaaacattgctcaagaaagagattcaaaattaatccataaaaaagagaaattagtaaatgaatttaataagctctttcccaatataacagttgaacctgaattttatttaagtgctttttatggtggtactcatgatggtttacctataattggaatgtatgaagagtttccaaattgtcactttatctatgcgtatggagataatggattagtatatagtatggtgctttctaaaattgttcgagatataattattagcggttcaagtccggatttgaatttatatttacaaactagaccaaaactaaatgagtaagctacatgtatgcaaaatcatagtagtaacgagtttatttagggttccattgtaaaaaaacgctattttaaatgtattagtttaatgtgactatttgttatgtttatgaatgcttaaataaagcatttataaacaatattatttgttaaacccattcatcttactaatttctgttatttgtataatccattctttttttaggtagggtagagttgcttggatatgatgatattcccattcttcctcaatggtaggataaaggttaaataagtatttttcttcatcatttgttacacttgctttaggattgccagtgagtttaaaataaatgtcgcaccatccgctatagtttgttaacataaataaaaaattaggacatgtgaattcgatgaggtatatttctttctctaattgaatatctgatagtaattcccttgcagtctcaaaagtaggcttctttttgtaaccattgcatgaatgccatgcccaaatggggaaatctatagtaaagtcaatacctttctgtttcatgtgtcttacaatgtatttatatgctgtgaaatcttctttactaacaaaaataggattggctataagcttaccttcattcaaaagtgtatttatagcatttttgttttgaaaagtccataggattgttgaatcaataaatgtatttaagtttgattgtttatcaaattgttttttcatctttcgctccattttcttttttattttgcagaattaagaataaatatgactaatcggataataagaaatacctatgctagatacaattgtaaatgcttatttaaagtaacagcaaggaataacctttgtatatagagtgtacaatacatgcaaaacaggattaaagaagattttaaatataatatgaaatagtacaaaataagaatttgatacatcttttatatataaactattaattgaagtttgtaattacacattatagttagtatactaactatataattagtgtactaactatattggaggttatatgaataatttaggctatttattacacaaggtaagtataatgacgaaaacagaattatcaaatcaattaaaagaatataaaataacagctcagcaatggtctgtgttaaaggatatatctctttatccaaatggaaccaccccggctatgattgctgaaaggctcttagcagaccgtccaacagtaaccggaattatacaaagattattgcaaaaagaatggattcttataaaacataatcctaaagataaacggtcacatttaatatttttaacagatgaaactaaggcattaatacaggagatagaaaatgtaagcgatgaagttataaaaaatgctacagctagtattcctaaagaggaagtagaaaatacagttcgagttttgcaaagtatgattcaaaatttacaaaaaaataaagggtgattaaaatgattttagtaacaggtgctacagggaatgtaggaaaagaggttgtaaaatgcctaataaaaagaaatgctactttcaaagtcacaacgcgcagtagagaaactgaaggagtgtattttgattttgaaaacccctcatctgtaaaggcggctttaacaggtgttactaaagtctttctaataagaccaccacatctagctgatgcaaaaaagtatttccagcctgttgtagatgccgcaaaagaaataggtataaaacacattgtatttttatctttattaggtgtagaaaaaaatccgatagtacctcatgctaaaattgaagctatgataaaggcttctgggatcccttacacattcctaagaccgagtttttttatgcaaaatttattatcacaacatggtgatgaattaagaaatgaaaaaataattgaagtacctgctggtaaaggggaaacaagttttatagatgtacgggatattggagaagttgcagctaaaatattaaccgaagagggacatgaatttaaagcttattctttaacgggaaatgaggcattaacatattatgaagttgctgctattatttcaaaaataataaataaagatattacttatacaaatccaagtatatttaaatttagaaaaagaatgattcaaaagggacttaacagtgactttatttgggttatgattggaatatatacaactgcaaaattagggttagctaaaaaagtcacatcagatttatcgaatttactagatagaagtccaataactatggaaacgtttgtttacgattacaaagaattattaatataataatgcaaaagtaaaaaagaggattattcacataaagaatctattatgttttaagagtaagaggggatagccatgcaaaacaaaattatcgttatgtttcaaaaagattttcgtttatatgataacccagctctatttgaggctgttcagtccggggaggttcttccggtatatgtacaagatgaaactttttcaataggaagtgcggcaaagtggtggttacaccatgctataatagatgtccaaaagcaacttaaggcattgggctctactttaataatccgcaaaggaaatacacaggaagaaatactttctctcataaaacaattagatataacggctgtatattggaatagttgttatgatccagacaggttaaaatctaatcaaaaaatgaaaatgatattagaagataaaggtattatttgtaaggaatttaattcgcatttattattagaaccgtggattataaaaaagaaggataacactgaatataaggtgtttacgcctttttacaatgcatttcaaaagcaggtaatacctaaacctattaacagagtgcagagtataaagtggggaaactctttaccagcaagcttatctgtctcagaattacacttgttgccgactataccgtggacatctcatatggaagcaatatgggagcctacagaggaaggggcatacaaaacatttaagaaatttttctctagtaaattagcctcttatagtgaaggaagagattttccaaatcaaaatgtccattcgatgttggcaccgtatctttcatttggacaaatatcagtaaagctaatgtttcattacttaataaataaaagtactgaaagacaatctagtctctttgaaaaacaagttaatagctttatacgtcaattaatttggcgagagttttcttattatttactataccattatccatttacagtatataaacctcttaataagagctttgaacattttccgtggaataaggaagaggagttattaagagtatggcagaagggtgaaactggttatccgtttattgatgcgggaatgcgagaactatggcaaaccggttttatgcataatcgggcaagaatggctgtagcctcttttcttgtaaagcatttgttaattccgtggcaagaaggtgcaaaatggtttatggatacactactagatgctgatattgcaaataatacaatgggatggcaatgggttgctggaagtggagcagatgcatcaccgtactttcgtatttttaatcctatcacacaaggagaaaagtttgataaaaatggagagtatataagaagatgggtaccagaattaagagatatcccaaacaaatatatacataaaccttgggaagcacctgagcatattttacaaaaatccaatataaaacttgggaatacatacccttatccgattgttgatcataaggcagcacgagagagagccctttgtgcatataaaagtatgaaagaatttatataaaatacacgagtcaatatgaatttgatatgtaaaagttataatgtctatttgcgtattaaagttgtattcattgaaagagtatacgaatcatatagagtttctaaaaccttctattaaaaaggagaatgtttatgaaaaaatctagtattatagtatttttactaacatatggtttgttttatgtttctagtgttttattccctattgatcgtacttggtatgatgcgttagaaaagccgtcttggacacctcctggtatgacaatcggaatgatatgggctgtattatttggacttattgcattatcagtagcaattatttacaacaactatggatttaagccaaaaacattttggtttttattccttttaaattatatattcaatcaagcgttcagctattttcaatttagccaaaagaatttgtttttagcaacaatagattgtttactagtcgctattactacgttgcttctcatagcggtttcttccaatttatctaaagtatcgacatggttgctaattccatattttttatggactgcatttgctacatatttatcttggaccatttatagtataaattaaaggcgtaaataaaaacttgagcataataaaaatgctcgagtttttatgtgtgttaatgataatccgaaatatggaatatatacatcttatggaggtcatctttgtgaagaaatggataaaaattacgctgtactctttactagctattttaattataggaagtattacttttttgacttggtctcagtttacttataaaccgacgcaagaggctttgtcgttagtagatgataaaaaagatgaagataatatcgtttttggagcgaaagatgcgaaagtaggggttattttttatcaaggagctaaagtagaagctgaggcttatagttacttaggagaagctcttgcaaaagatgggcactttgtagtaatgcctcagttaccattaaatttagcgatacttggaataaatgaggtagacagtgtaattgaaaagtatccggaagttcaaaaatggtatgttgcagggcattcaatgggaggagctatgatttctaagtatgcctttcaacatgaagacaaggtagacggaatcattttcttaggttcgtatcctgcagatgacttctctacgaaatcgattccgatgttatcaatttatggggaagtagatgctttagcaactgtagaaaaaatagaaaacaataaaaagttcatgtccaaaaatacaactatgcacatgataaaagggggcaatcatgctcattttggtatgtatggtgagcaaaaaggtgataatgcgagtttaattacgccaaaagcacaacgagatgaaacagtaaaagtaattgagcaatggttattggaacaatgataacgaatttaataaatctaccgaaagaattatccaaacggtagatgggagagagaataaagagccaaatcgtatgaattggctcttttatttatttgctatctccaattgtacccttattttctccggaatgtccttttcagaaataacgtcgtaagaatagacatactttccttttacatgaatttttaagtaagtttttcttctaaaatcattaggcgtgttcgttccaattttatattctttttcattgcttaattcatcaacaccttttagtgagtacatagctcttcctttatgatgataatctggaacaccatatcctttcgcaacggcatatacatttttttcttcagcaatcggattaaatctgtctaaatctccacgtaatatgaaaggtagtaagtatatagggaggcctattcctagtataaaaattacaaatttcttcatgaacgtttctccttttgttaaattacttatttttaagtataggaaaaaattcttatgaatttagaagtgaatttcttaagtttttcttaaataggtgtttaaaggagggataacattgtatggttattctttcgtgcaaatcgtattattttttatttatatcttcgtggcttttatgcaaaacacaacatttctagatgaaattagatctccttatatatattagaaaatgtattttgtgaattaattatgaatatattttattttaaaaaacatcccttgataaatacacagagttattgtaaagtgatgataattaaaatgtatattgtgtgaaaacgataaaaggaaagagtaaaagtagtttttcttttagagagtcggtcggtggtgtaaaccgaagatggggaaataaaccaaattaggttcaaagatggttcgtatgctgacattatttttatggctctttatataaaaataccgagtaaccactcattctaaggatgagtggttacttgcagtttgtttaaatagagaaatattgctaccaaggaagcaagtttatatatgcggttctcttccttttatggaagctagtattaaaattttgtataaatgggaagtaccaaaggaattgattcattatgaatcgtttagccctgttgcaattataggtgattaactaataccggataggattataatcataataatgtaaataaatagttttttgcgatatttcaatagtgaagtatcgtttttcattgtataactaaagcccagctatggattctgatgtaatgttgaaaaatgatcccaagtaatgatttgtctgttgcaatactaagtaactatgacgaatttgaatctaaaaagtatgctaataaaatagcggaatttttttaaaaaaaagtaaaaaacaatagagcttagatttgcaatgataaatgttttttcattagataattactttaccgataatcgagatgtttgcggatacatttattttttggatacataattatatttagagaatacccagttacagtatttgaatttttaataagaagggatgcgaaggaatgaactcacagagacaaggctatgtaggctggtggcaaggcgggcacggtggtggttggccgggtggacacggtggttggcaaggcggacacggtggttggcaaggtggacatggtggttggcaaggcggacacggtggttggccgggtggacacggtggttggcaaggcggacatagtggttggcaaggtggacacggtggttggcaaggcggacacagtggttggcaaggcggacacggtggttggcaaggtggacacggtggctggcaaagtgggcatggatattaaaaagaggctataaaatcattttttatgcaaagtttgtatatttagtatcgttgtatattttcatttgtatagtaagtatatagtgaaaacagcaaaaaattctgtgaagtaagaattccatccgaaaaattaaagcagcagaaatgtcaaaagaacaaaagacatcgctttttattattcaaggtgaaagagactatcaagttcaatcgaaaatcgaaatctctctatggaaagaacaattaaaagaacgagataacattgattatcgactatatccaaagttaaatcatttctttacagaaggggatggagaaataagtaaaccggatgaatattatagtcctgctaatattcttgagtatgttataaatgatattgctgcttgggtgcaaggaagatcgcaattaaattagcaactatatgttttaataaagactttctttctgtaattaaactagaaacattattagggtatatgttttttagcactcttttaaaaagagtgtttttttattttcctttgatttaattaacgaaaaaaatatcttgtactccttttgtaacttttttaaatcgaaattttctataaaacaataggcttgtcttccaaataaagcgttatttgtaacactgttatcaaagcaaagtgctcgtgacatttccttgatattcaaaaacattaataacctattatgtgaagttttttgaaaatttaggtttaacatctttaaaataggtgtattacatattacataacaactaaataagaaaataaaaaatctaagggaggaaaaatacgatgcataagaatgaaagaaaaccggtggtttatgaatatcaaaatgaacaggaagtagttatgaaagtaaaagagctagaattgcaagggattcaccaagatgacatttacgtcttaacacatgaaaaacatataacaaaaaagattgcggatgatacaaacacaaatacgattggagtaaaagaacaaggattgggcacaagtattatcaactttttctccaaaaaaggggacgagctccgaaatcaaatggaggaaatggggttgtcgaaggaggaagctaacttatatgaagaaaaactagatcaagggagaattttacttctagtaacagatgaaacactaacggcgagtgataggcagccgcaaaactatcattctctctaatagattgcaatatctgataaatagataagttaattattttaggttgtagcatggaagaaaataaaagtagagaagggtgagaaaaatgaaacatacaatatttaaatatgctgtgattgggattacgaccggagtcatggtatctctgttaaaaaaagaaaatcggaaagctatacaaacaaaaggaaaaagcgtaaaagacaaactacaagaaggaaacataaaggaaacattagagaaggtaaccgagacaagtaaacaattctctgtaactgcagctaatgttgcaaaacaaacattaccacaactgcttacagccacaccggttgtcatttctactattaaagatttaacagaaaacgaaaataacaaaaagaaaaaagatgaaaaggataatgaaataaaacaaaatagtaagaacctagacggagaaaaaacggaaaatgaaaagaaatatgtgaaagaagggaaagaagagagtgcttagatttaattctaaaaagagaaagtgaggaaaaaagtatgaaatctctgtatgcaattgatgtaggaattggttttactaagcgggcatatcgacaggatgtagattctgaggtgacgattaagagtgaagctgccacactagctcctgtacctaatcatgctgaaagtgaagatttaacaaaggtaagttttatagacttagactttgcatactacatgggaaatgaagcacatcaatctgacgcttcatttcttcctccatttgacgaagaaatagaaaattattatgaaagcgaacagtttaaacaacaaatatttggttgcattgcaaaggattataaagaaaatgtcgtgttacctttagttgttaccgggcttccagtcacttgttttggtagtcagcatgagcaattacaacgtgcactaaaaaaagaaacttccgtacaaattgatgggaaatttattaatattacggttgaaaatgctttgattcttcagcaaccgatcgctttacatgcctatttcttaaaagagggaatcattcaggaacaagatcgcatcttaattattgatggtggatttcgtacattagaaatgacagatatgaaacagaatgtcattttaaatcattatgagacggaactaggatgtagcaagcctttgaaaaatattaagaatatcctgcagaatcatgcgggtgaaagtaatcaattgcatattaatgacatgccaaaaatattagaaaaaggatatggagataaagaagaaaattatgagacaagtcaggtggatattttaattcaaaaagagttggatacacatttccaagacatcatgcgtgtattacaagaacaatttaagttagaccagtatgatactattatttggacaggaggagtagtagatctccacaaaaaacaaattgaaaaaatgcaaggtgaaattgtttctttccgtatggtagacgcttcaaaagaggccgcgcttcatggatactatattattggaagtcaagtatttgaggacatcaccaatcaatctgcatataaatccaaattataatgacgaccgaaatggagttcgttgaatagacgtgccaaattgtgtggcttcttttccaaatataaataagaaaagataaaaagtgcttgtatagaggaaatgtttaaaattgagaataaaaataactaatatatagggggtcttcctttttaaagaataagacctcctatgcatttattttgtaatttagatgatttaaaaacttttcctccaagatatggatacctacatacaaatttcatattacggatatgattcgatcaaacataaaactatttagaaaggaagaataatatggaatgcataaaaatgacgaaatggagttggtatcatgtgaaaactagtgagcttgaagaaatttcttctataatcccccgtgatgtaacatcttatttccctcaatttgtaaagaaaataagttctccttgtgaaaatggattatatgtttatacgttatcaccaagtcaaacttgtgtatatggttcgtttttatatgatcaagataaaaaggacgccaaaattcaaaaatttcttcattatttcgtagctcatgggatactgataacggtccaagaaaaagaggaagaagattttcaagaattaatacataaattccctataggtataaaaaattgtaatagttccgctgaaggactatgtgccatcttatcgatatttatatctcactatttacgaaaggttgactattttgaaaacaatttcagaaatgtgttatgggatttttatcattataataacatagcagttttagaaaggatttatcatattcgtcatgaattatttatgaacacacatgtgtttcgcttaatacaagaagtgttacaaggcttggaggaagcttggttagaaaaactaacaaacaccctttgttataaacaaacacacgtaaaattagagcgtggattacaacttgttaaagagtaccaagaagaattagacacgatgattcatttgcaagaagttgtttcttctcatcgtgggaatgaaattatgaaagctcttactgtattaactgctgtgagtacgcctttgacagccttaggagcattatggggtatgaattttaaatacatgcctgaactagaatggaaatatagctatttaatcgctctcttatttattattttcacaacagcgggtatgtatatgtatatgcgattcaaaggatggacaggtgatttattacgagtaaagaaaaagaagtctttttttaaatctaattagtcctgtttataaaaaatatgatagacatatagttaataatatttattaattggggtagtgccatatccctatcaagttaaagttttgatgtccccgcaatgataaaaataaacttggtttccataaaaaacataatattttcatttaaaggctatgaggtgaaatgtcatcatcttcatcacgtttgaccttcaagaaataaaaagttaaactattcttgtactcgaagtactattatagtactggagagataataactttactattttggtatgaggtgaataaatgatgaaagatcggattgccaaaactgctattgcgctttttcatgtaaggggaataaaattcacaatgagtgatttagctcgtgatctaggtgtaagcaaaagtacgctttacgagcattttccatctaaggacgagcttattggttatgtagttgagcaaataaatgaagaagcccaaatacgttttcgggaaattatcgataattcgaatttgaccataccggaaaaattaaaagggattcttttaattgtgcctaaggattttcagcacagcttcgtacgtttactgattgaactgcgacgttaccatccagagcagtgggcaaaaatagaacaaggcataaatgaagaatgggaggtaattactgggctagttgaagagggcatcaatagcggtgttttacgttcaatggacattccagtgctaatccaaacactcaaaacgttaatgaaatcaatttttgaacaggggagtatagcctctaaccaaattactctacaagagtcacttgcaatgatggccgatatcatattgcatggaatcacaagtaaggattaaatagtacttctacataaaaaatgagtagggtcacaataaccatacaggttaacgtagcctcgctcattttttatttttatcccgctttaatgggcagtaagattcctacctcaaaattcagtgaaagcaaagaatttaggtgggagatcaactgcccattaaagtccgattggtgagggctgattaaagtttcactttatgtcgattttacttaagggtaattatactttacagtctggaagatttcggtataatataaaatgagtaccaaaaataatttttcggtactgaaggtacgaattaaggtaatcagagatggaaacgaaaagtttgtaattttaaattgttttttcaatttggctgggatgtccttgaagataaaatacgggtataggaggaatgtaaatggatttttttgagactgttataatcattgtgaattttagtattctaggctgtatattgttttttagtgagaaaataaaacaatggtctgtcttcattctaacagttgccttttgtgtggttggtgtgcagcttatcgtagaagggtatcgctggcagatgattcctgcttatttgtccccatttattttaacaagctgctatctatttgctgaatcaaaaaagaacgttaaaagttgtggggcattcacagtcaagacatcgctactggtcatttatttgactattgcggtcatgcttccttccctcatgccggtagttttatttgaaaaaacgagcggtcccttcaaggttggtactacactttatcattggattgattataatcgagaagaaccttatatgaaagatttgaacggccggcgcgagctgatggttcaggtttggtatcctgcaaaagaaaaaggagagatgaatcgcgcaccttatatccataactcggatgagattgccaaggggttggaaaaatcattgtctattccagcattcgcgtttcatcatctaggcttgatgaagtcgaatgcattcatggaagctcaattgtcagattcagaggaacgttatccggtcctactcttttcccatggtttaagcggttttcgcaatcaaaacacgtttgaggtggaggagttggccagccaaggttacatcgtcgtaggaattgatcatacctatgatgctgcagctaccgtctttccagatggcagaaccgcttttgtacagtcgatcaatttaactgattttgccgaacgagattgccatatcaaattatggaaggaagatgttgtttttgtacttaatcaaatagagaagcttaaccaaagcgataaagataatcgctttacaggaagaatggatacatcccgaattggaatgtttggacattcttatggtggagctacagctgcgcaagtgttagtggaagactcccgtgtcaaagcagccatcaatatggatggtacattatatggggaaaatgttccgaaatctagagttggaaaaccgtttttgattatgaatgcagagactagtgatgattccacggaagattttttagagggaaaagttcgtagtgaccatgcacttgcaggtggtggcatgtcaatggttattccccataccaatcatacgagtttcactgattttcatttgttctctcctttgttacgaagcttagatgaagatccaagatacgttcaccgtattataaacgaattcagtctcgctttttttgatcgatatgtgaaacaggtagacgatagctctgcgcttgaaaaattggactccaaatacccagaagtgaaatttaaagtgaattgatgacaatgtcttttaatatatttgctaacagttgggtatatattttaatcatcaagaaagattgccctctgtagcatacagagggcaatcttttttaaattaatataaaggagtttttttatgtttaatagattgaagtattttcttttatccgagaaagaaatagttgaaactgtgaagaattacaaggaggaaaaaatacatgttttcataataaaagattttttaggggagttaatcttaataagaactcttatatttttaatgtttgttccaatatcaacttttattttttcagttgtaatttttggagctgttttctttttatccggtattaagattaccatttggggcattgctataatgttattggttccaataacattacttttctatatgaatataactaatacatcaattattattactgatttagtgaagaaatttttattaaccataaaatatctaaatccattttactcaatattaaataaaccttggttatttatttttgaattattatttggttttttatatgtcttcgtgctatctttgttttctatttggatagtattacattcattagaaataggtttctctgaatttagttcggaggacaatcgaagtttccaattttcaattattattttgcatacagcaatttatttgtttataagagttcatggccagccttgtaagacaactaagcaaaaaattaaaaaactgaaaatgaaattttatttatggttttgttctatgattgcaagtattgtatatatatttgaatcactctttaattatatgaatggaattcaagcaatttattttatatttgttttaatgattgctttagaaagaacagtgacacattataagaaatttatagattttttagaatctgaaaatttgtatgaaaaataattttagagagaaaagtcatttgaaatataaaaagttatacctactaagtactgaacgagtaaaaaaacgctattctttctctagaatcataggaaaggatagcgttttttatgtctatttttgtatctgatgaactacaactatttgctcaagaaattcaatgttatttatccccgaacatcttaagaaatcttgccagagagtctggtttcgtgcaacgaacctgtaaattccaaacaaaaagtttactcaatttatgagtatgtatggaaaaagaaagagattcaataatgctttatttaatattaatttatacagaaatacatattaaacaatatgtaataatacattttatgatgatttattaaaataaaatgttatatttttgggtggaatatataaatggaggaaatgttatgaacaagaatttaaaatttactcaaatgatgatcggtattagtacgatggcattatcatttggaagtattcaaacacaggtatccgcagaagaaaaagcaccctataatacgttacagatgaaaccgattgggacagaaactttaaaagatgaaattgcacatgctacaaaagcggatggaactttaacttttgaagagcgtttaaaagtaggcgatttttcacaacgacctacttcggtgatgaaacatgatgaaaggcaattaaagcaaagctatactctggcagaattgaataaaatgcctgatagtcaattcattgatacgctatcaagagtttcatggaatcaaattacagacttatttcaattcaatcaagatacgaaagctttttatcaaaataaagaacgtatgaacgttatcattgatgaattaggacaaagagggacatcttttacgaaagaggattcaaagggaattgaaacttttgttgaagtattacgttctgctttttatgtgggatattttaataatgaagtaggttacttaaaagagagaagcttccatgacaaatgtttaccatcattaaaagcaattgcaaaaaatccaaactttacattaggtacagctgagcaagatagagtagtagttgcgtatggaaagttaattagtaatgcttctagtgatgctgaaacagtacagtatgcagcaaatattttaaaacagtttaatgataacctttctatgtatgctaaaaattatacgaaagaacaagctgtatatgaaattgtaaaaggtattgattatgatctacagtcttatttgcaggaaacgaataaaaaacctaatgcaacaatgtggtatggaaaaattgataattttataaatgagattagtagaattgctctcatacggaatttaacaactgagaatagttggctaattaataatgggatttattatgcaggacgtttagggaaatttcatagcaatccaaacaaaggattggaagttattacacaagcgatgaatatgtatcctcgcctaagtggaccttattttatagcggtagagcaaatcaaaacaaactacggtggaaaagattatgatggaaatacagtagatttacagaaaatacgtgaagaagggaagttacaatacttacctaaaacatatacatttgatgatggatctattgtttttaagacaggcgataaagtaacagaagagaaaattaaaaggttatattgggcagccaaagaagtaaaggcacaatatcaccgtgtaattggaaatgataaagcactagaaccaggtaacgcagatgatgtgctgacaattgtaatttataataatccagatgattatcaattaaatagacaattatatggatatgaaacgaacaacggcggtatttatattgaagagaagggtactttctttacatatgagcgtacaccaaaacagagtatttatagtctagaagagttattccgtcacgaattcactcattatttacaaggaagatacgaggttcctggtttatttgggagtggagaactatatcaaaatgaacgcttaacttggttccaagaagggaatgcagaattctttgcaggatctacacgtacaaataatgttgttccacgtaaaagtattataagtggcttatcatctgatccggcaagccgttatactgcaaagcaaactttgttcgcaaaatatggatcatgggatttttataattattcctttgcactacagtcttatctatataatcaccactttgaaacctttgataagattcaggatttaatccgtgcaaacgatgtgaaaaattatgacgcgtatcgtgaagcattaagtaaagatgcacagctgaatacagaatatcaaacgtatatgcagcagttgattgataatcaagataaatacaatgtaccacaagtaacaaatgattacttaatacaacatgcacctaagccgttagctgaagtgaagaaagaaattgtcgatgtaactaatataaaagatgcaaaaatcacaaaacatgagtctcaattttttaacacatttactgtagaaggcaagtacataggtagtacatcaaaaggtgagtctgaagactggaaaacaatgagtaaacaagtcaatcaaaccttggagcagttgtctcaaacaggatggagcggctataaaacagttacagcctattttgttaactatcgtgtgaatgcagccaatcaatttgaatatgatattgttttccatggtgttgcaacagaggaaaaagaaaaaacaacgactatagtaaatatgaatggaccatatagcgggatagtaaatgaaggaattcaattccatagtgatggtacagaaagtgaaaatggaaaaattatttcttatctatggaactttggagatggtacaacaagtactgaagccaaccctacccatgtatatggggaaaaaggaacatatactgtggaactaactgtgaaagatagtagaggaaaagaaagtaaagaacaaacaaaagttactgtaaaacaagatccgcaaacaggtgaatcccttgaagaggaaaaggtactcccatttaataagcttgtaaaaggaaatctgattgctcctgatcaaacagatgtttatacgtttgatgttacagttccaaaagaagtagatatttctgtggtaaatgaacaaaacattgggatgacatgggtactttatcatgaatcagacatgcaaaattacgtagtttgtggtgaagatgaaggaaatgctataaagggaaaattcgtagcgaaaccagggaaatattatttgaatgtgtataaatttgatgataacactggtgaatattcattattaataaaataaatttattttccatatgtatataacggttgttttttaggaggagtctgtcacgataggcttctcctaatttttactctaaaataagttaataaattaggtaattatctctaaaaataaatcattataaacctaaaatattcaattaaaaaatagaagagagggagcttgcgtcttaataaaactaatattaggagttatgtcacatttcgattaaataaaatatcgtaaaatcctcagaataaatttttttgcatgttcattcatttagggtaattctcaactcttaagcagatgtatgtgggggaccgattcatatacatctgcttaaataattagatattttatttattaagttaagcgaaattttattcgtatatgaggaaggcgcatttaattcttttttcgaatgttattcatgttaatcgtattccatcgaatgcgcttgttaccaagtgatgtacataggaatcatccaacttatcaccggttactagcaaccgataaaaaattggtccgtaaatgagatcgatggataattcaatatcaaggttttctttcaattctcctctttgaattcccctctctagaagttgctttgcttgcagtcgacggggcggaaacatcgagtacgatattcttccgccagttttaagtcaacgtttgattttctctttgcaaccagaagtgcgtagtcgcttaaatggattattcatgtctattttctttttgggtggtgctgttggaccctttgtcggaggatgggcatacgcttgaggtggatggagtgtagcattgtggatcggaatcgcttgaatgcgtattcattgatatgtctgagttttatagattatttgcggttattttgaagtttttacatcacaaccagattttttgtctctatcgctaaaagagggcaaaactcaccatataaaatgtgtccgaattccatttagactatgaaaaaagagagcttgcgctagacaacaagccctctaaaaaataacgtaattgagatatctatatattaacagttattttctaacgattccatatgtcttatgttgagaaataaattataagtggcttgataaagctaaaatgaatgattgacataatattttgacgataatataataaatctcgaattcaaggtaatttgtaaaggattggtaattgtgagcgtgattaacgatgagagcttatctttaaagttaattgttatattatcaagggaattacagccaatcactaaacgtattgaaaaggatctaaaaatttatggacttaatgcaactgaatttgcagtgcttgagctactatacagtaaagctgatcagcctataaaaaaattggggacaaaatattacttgcaagtttttgtatcacgtatgtagtggataggttggaaaagaagaggtgaaaccatgtcctaaagaccgccgtgtcacgtatgcatcaattatttcagaaagtattgaattggtgacactaatttttcctcagcataaagaggggattcggcaaatatttggtagtttggactatattgagaaaaaatgataagtaaacagttgaaaaagttaggatattacgcacagaaagtgtaagtttttagatgttatttctgtttagtaatatcctaattaaatataaattaaataaataggagggaaaattaataaatagtagtaaatgtattgtagtacaaaataaagaaattatgtaattgcaattgatatagtaggaaagatagttgttatgcataacgtatacatattgtccttttcattataaatctttcataaagcggagagtgggagtgggtatcaagaatggaattacgtcatttagagtactttattcaagtttgtaataataatagttttactaaagctgcggaagttctaggtatttcacagccgactttaagtcaacaaatccgtgtgttagaaggtgaacttgatacacctttgtttcatcgagttggaagaggtatcaaaatgacagaagcgggtaagctgctatttgataaaggaaaatttatcatgcaacaatttgatgacgtttataatgaaatttttgaattaaagggtgtaaaaagaggtgtaattactataggaggtttattagaggatctcacttatttaacaccttatattatgaagtttcaacaacattatcccaacatcgttgtaaaaattatagaatccgaagttgctgtaaatcaaatcgttgataaaaatattgatataggcatcacgcgtagtgctcaaattccagacacattaacaagtacccttttgtatagcgaagagcttgtccttgtcattcccaaaaaccatcctttgaatgaaacatcatttgtttcttttagagaattagtagggctcagtagaataatggtttcatgtagttgtcgtgaaactattaaaatatattgtgagagtttagggctatctttatctgaagtaaatatagaaacaaaatcttccatttctctattgagccttgtatgcaatggacatggggttgctataatacctctttcactagttgactttgttaataatgatactttgagcatagttcgtattattgatccaacaccaaggcaagatattaatcttattcactttgatgataaatttttaagttttgcagcacgtatctttatgcagaagttacatgatcctgaaaaagtattagtataatagaaataataatgattatagtgtgagaattaaaaatgatacataatccttggggtaagagctaaattacagtcaaagggcattgactttatatgtgtggtgtgatcgattcaaatgggaatatcattgacttttacttaaggaaaaaagggcagactttgcaaggggagaaggctgttaaaaataagtcaagttaattaattaactcttcggttttatcacatagtaatagattccattagggagatactgctatttctttttacatatccttattgcataaagaaaaccaccggcattataccggtggttttgatttagaaagcaaagcaagtacaaccaataccccatttagttccatcttttcctattacggtatgagtgtgttgatggagagggttactgcaactatgtaacttgttatcatgggcatcgtgagaaagtatagtgttggctaggttagcaccgccataaccataaacgcccgtcggtgaccagtcaggtgatgctggcggcaattcaggtgataaatttttaaattcatcatttccatacacaacctgtccgcccataattgtgagtaatgattcaaggttcttgatttcttcttctggcacagtaaagtagtcagcagacaatacagcaagatcagcaaactgacctactgcaagggttccttttttaccttcatcaccagagaaccacgcacttccttttgaatataattccagggctacttttctatccagtttatttttttcatcgtatatcgaaagtccaccaatggtttttccggcaaccatccaataaagagcgacccaagggttatagctggaaactctagttgcatcactaccggcgccaacaggtataccaaggtctaacatacgataaatcggaggagtacgctttgcagcttcctttccgtataaatcaacaaagtattcaccttgaaaagccatgcggtcttggatggcaatacctccatttaaagccttaacacgttccatgctacgatctgagattgtttctgcatgatcaaaccaccatcgtagaccattaaaaggaatttcactgttaacttcctcgaatacatttaagaaacgtgtgattgactcatcataagttgcatgtaaacggaagggccaacggttttccaccaatagagaaattactttctttaagtcagcttccatcatcgtagctagttcaggccgtggcatttgaaatttttcaaaatcggctgctgagaatactaacatctctccggcaccattcattttatacttatcagttccttgacctggagaaacaatttttgcccatgaagcaaagtcttcatattcatgatttggattttgcgtaaatagattataagcaatacgcaaagttaattgttccttctcggctaaatgttcaacaactttgtaatcatcaggataattttggaatccaccacctgcgtcaatagcacttgtaatacctaatctatttaattcgcgcataaaatggcgagttgaattaatctggtcgtcaaaattaagtgctggtgctttacccaaacttgaataaagaatagaagcgttaggattcgcaattaaaaggcccgttggattacctcgtttgtcccgctcaattaagcagcctggagggtctggtgtatcttttgtatatcccagtgcatgcagcccagcacgatttacaagtgctctatcgtaaagatgtagcacaaagacaggagtgtcttcagaaacggcattaatttcttccaaagttggcaaccgtctctctttaaattgaaattcagaccaacctccaactacccttacccactgaggagcaggtgtacgccttgcctgttctttgagcatttctagagcaataaaaagtgatggcacgccttcccaacgtaattccatattataatgcagaccaccacgaataacgtgtatatgagagtcattcaggcctggaatagctctctttcttttaaggtctattttttttgttttttccgtggcactattaagaagctcatctccacctactgcagtgactaaaccatcagttatggcgatagcagatacctcaggctgagaagggtcaagggtagtaatttttccgttatataagatcatatccggtaaattcatgttcacacctcgtctactttctattattttgtaaccatggatgaaataatttaccgaaaatcggcatgactacccatgatagcaaggacactatacatactgaaacaaaaaaggccgacataataggattcatatgttttataataggtcctatcactttaggaactaacatgctaagaggccatacacccaaaagggtaacgatagacattttccattttggcggtggaactggcgttttcggagtaacaaaccaataagccaaactactttcagttttgtaactcggattagtaacttgaaattgttctgccgtttttaacaaatcccggcgaatgtctgattcttgccaagcacgtagatgctcatacgtatcaaagcgaaaaataacagtatactctctcgattcgttatttgggactattagatttacacctaaatgccctgggaatttagtagcggcagcttcgatttcatgtctccatgtttcaaactgtttttctttaccttgttgaatttcccatgtaacaatcgttgttactggatcagcagcatccatcgtgttccctgtataagtctcttcgacagctactccttcttgtttcatattttcctgcttggaagcgcgccgtgcaccatagtatatgcgtattctactccttgaccataagcgccagtgtgctcctttacaatttccattacagcatcataagtgtctttgtgtgcccagtcacgttggtattcaagtaaaacttgaattgctgtcactggaattgcaccagcttgttctacacgacgcatagcagcgttatgtgctgtcagactagtaccacctgaagcatcatcaactgcatacacttcatagccagctttcattgcttcaagcacagggaatgcaaggcaaacttcagtccaaagtgctgcaaatattaatttctttctacctgttgctttaactgcttcaacaaattttggatcttcccaagagttcattgaactgcgttctataatttcatggtttgggaatatgtcaagaatttgtggccaaaaataaccagaaaagctgcgtgtctcaactgtagtaagaatagtaggtacgttaaaagtttttgctgatttagcaagcaacataacgttattaatcaatgtttgtctatcaatacttgcaactccaaaagtcatttggggttgaaaatcaatcaaaattaatgcactgttctccggatttaacaattctaacttactcataataaaacgctccttttttaattgtttatcgaaaataatatattttctgtcaattaaaacactgctatactttttaatgtaaaatttagtgctgatttaatcagcactaaatttatactatctactttaaaaagtgatttaaagctatttccttggaatacacttatacattttgcttactaagatctcgttgagctcccctatagcttccaattatattttgatagcctggaagattgctagcaagcaaattgccaaaaccttcgacatcgttgcgccaatcgcgttgtaattcgcaagctacgctaaaccagttcataagttgtacgccattatgtgccatacgcgtattggcagcatctgcaacttgtttactgaaagttcctgaagcatcagtaacagcaaatacttcatatccagcttttatagcggaaagtgctgggaaagcaacacaaacgtccgtaactacgcccgcgatgataagttgtttttttccagtttcttcgattgcttttacaaaatcatcattatcccatgcgttaatttgtccaggtcgagctatttttggtgcatgaggaaagagatcaaccaattcttgcattaaaggtccattaggcccgttttcgaaacttgttgttaaaataactggtaaatcaaaaaacttagcagtatgagcaagggctaaaacattgttcttgaattcatcaacaccatagtcacgtactagtccggacataagaccagtttgatgatctactaaaagcacgagagcatcatctttgttaatacgagaatagagatcagtcattatgtattcctcctaaaaattaagtaatcaaagaaagtttaaatagtcgaatactatcataagtttcttcgtttataactaagctgaccaataatattggttatagcagcattcacggaacatgaagcgctatacaaatttatagtatttgaaaactgattcgttaatcaattctaaattatctatagtttgtataggtggtaactatagttattttcactataaaatgaattggttttacctatacattctatagatagaacgatattgatagtcacctacttttgttattacaattgaataggagaaatgttcagcaaatacttcgtgatgaaaaaagtatgagatggggaagcgttccataaacagaaaatgaattcatcggaacaatagagtttcatacttagcgttcacaatataaatgtgcataaataggttatgagattcatccggattattgaagaaaaggatatatattaaaggaggtaggaaaatggcaaaaattactgtaggaaccgaaaatcaagcaccaattgagatatattatgaggatcatggcataggaaaaccagttgtactcattcatggttggccgttaagtggtcaatcttgggaatatcaagttcccgctcttgttgaggctggatacagagttataacatatgatcgtcgaggttttggaaaatcatctcagccgtgggaagggtatgaatatgatacctttacttctgatttacatcaattattagaacatttagagcttcaaaatgtcacacttgttggtttttctatgggtggaggcgaagtagcccggtatattagtacgtatggaacagatcgtattgaaaaggctgtttttgctggagcagttcctccatatttatacaaatcagaggatcatcctgaaggggcattagatgatgcaacaattgaagcgttcaaaagtggtgtgattaatgaccgccttgcatttcttgatgaatttactaagggatttttcgcagctggtaatcgaacagatttagttagtgagccattccgtttatataattgggatattgcagccagtgcatcacctaaaggaacacttgattgtattaccgcctttagtaagacagattttagaaaagacttggagaagtttaatatacctactcttattattcacggtgattctgatgcaactgtaccatttgaatatagtgggaaattaacacatgaagcaattcctaattctaaagtaacgttaataaagggtggtccacatgggctaaatgcaacgcatgccaaagaatttaatgaagcactcctattatttttaaatgactgattacaactatataattgttaattgataaattataaacaagtaaaaaataaagctttataaaagatgctcttggataaatccaggagcatctttttaaatggtgatattgagatgttaggttgataaatctccattaattttggattgaatactcttcttaacagctaaaatatattgattagagttttttagatttcttagaagtattgttatattactatcaagataatattttgaataattctcaaaacaaagaaatatacattttttgaggaagaaatatcttgtcagaaaacaatgaaatcttattaatttttataattggtagaatttttgtggaaataattctcttaatatattaaaataacatcgtattatgtcagattttaattaggggagagaaattttatgttgaaaaaaatcattccagttgctttagcattaagtacagttacttttactagtgtatttgctatgccttcagcccaagcaagtacagaatcaaaccgctacatagatgtacaaatgctcggtattaacgattttcatgggcaactagacactgtaaaaaaaattaacaataaagatgcagggggaattgagtacttaggggcttatttacgtgatcgtgaaaaacaaaatccgaatacattaaaggtacatgctggagatgttgttggagcaagtactcctgtttcagcattattacaagacgaacctacgattgaatttctaaatgatttgaaattcgatgttggaacgatagggaatcatgaatttgatgaaggtgttgaagaaatgaaccgccttatttatggtggataccatgagaaaacagggaattttaaaggagcaaaattcccatatgttgctgcaaatttctataataaatccaccggtcgtttatttttaccaccattcactataaaaaaggtacaaggagttcctgttggatttatcggagtcgtaacaacggatgttcctaaccttgttatgcctactatgctaaagaatgtagaaattacagatgaagttgaagctattaacaaatccgtaaagcaattaaaaaaactaggcgttaaatctatcgttgttcttgcacataacggaggtataacagatgggaacggcgtaacaaatggtgatatcgtccgattagcaaatgagactgatccagaagtcgatgttatttttggtggccatagccacacttatgtaaatggaactgttaataataaacttgtcgtacaagcaaattcatatggtatggcttttgctgatgttgatgtaaagattgatcgtaaaacacaagatattgttgagaaaaaagcagaaattgttacaacttatcatgaaggcatagagcctgataaaaaaataaagaagaagatggagaaatatcaagcaaaaatcgcacctcttgttaatgaagttgtaggtaagtctattgcgccactagatcgcaaactcaatacggctggtgaatctactcttggaaatttagttgctgatgcccagcgtacaacaatgcaatcccaaattgcacttatgaatcctggtggtattcgtaatgacttagatgctggtgatattacatggggagagatatatggtattcaaccattcggaaatcaattaataaaagtaaatttaacaggtcaagacattcgtgatattttaaatcaacaatggcaaaaagacataacaagaatgcttcaaatttcagggatccaatacacttgggatgcgaacaagcccaatggagaaaaagtaacaagtattcgcttaacaaatggagaagaaatcattccttctaaaacttacagcgtcgttgctaacgcatttttagcttcaggtggagatggatttgtatcttttaaaaacggtaaagatgctgaaacaggaccaactgattttgaagcattagtagattatataaaaaaatcaaaagaaccaattcagtctgttattgatggaagaattcaaaaaataaattaggtttttgttaatcttaaaaacaaatagattacctgtgcactatactttttcgtgtgcaggtaatctatttgtttgcgttttcgggcacagacgctacttcaatcctatcaatatagaaacaatttcgaatgtaaggaatttgtaaggaaaaagagattttcaattatatgtacatttatttaataaagtagcgtatctcattgaagatagtttgttaaaacgctcattgttacaagttacttacatgattaaatataaaccagtattaaacaaagaagtacaaaaagaattcccagagttgtatactcaatacattaagcagacaaataaaaaatctatgttgttagaaattgatgaagctaaagaaaaaggggagggaaagggttcccataaaaatactagaagaaattaggttacttatgcataaatagcataagtaggcacatgttatttataaatatattggaagtgcaattatcaatatttaaagatacgaaagtaatacaaatgaaattcttatttctactactacaagtactattgagcaaatgaagtatgaaattgcttttgaactaggagtaacactgtgacttgatacatcatcatctacaaatggttcggatcggtggagagattacaaaacgcttagttcgaatggttgaaaaacagttaacaggtcaatacagattacactaagaaaataatccgtatatatacggattatttttcctttaatttacaaaaaaataaaatttgaaatcgaaaaaactcctcagattcctttgtaataaacttttttagtcatgttaatggaataggtatcgaaaggtgttaaattagatatggaagatatatgagcccttaaaagggttttggtgttattcgcaattttaattccataattacttaagccgatataataaaatgttctatgtctaaatcgatataaaataataatcattaagtgatatttcttttttatagaataagtaaaaactgatattgtagtaattactgttttgaggtcaatttactgtgcaccttaattattgaagtttttttgttgattaacaactattgtatttggaaattaataataagtttatcccgctatttgccgggcagtaagacctccacctcaaaattcagccgaagccaaagaagttaggtgggggggcgggctgcccgtaaaagcccgattggtgagagctaataatcagtgggggatgaacaaaacccccactgattaaagtttcactttatgtgatgcggtaataaaactatctagtttgctattcttagtatttgtaaagtctatatatttttcctcttttgtggaaagtaaaactattgttacgaccagtaatatagtgtcatgtttttgaatattccattcgttttttatttttagttgatgaaaagacctttctctcaattaaatatttaattgagtacttgaatttcctccaccttgtacttttcaaagcatagtgcttcaaaaatagccgtatcgctttcatctgtttccaatttcacaacttctttattatctttttctaaaatttggagcaaaatagtttttcagtttcacatttaaattagcagtatttattttttgaattcaatttgtataaatgattgaattggaactttgactgttgtttcttgcggtggtacagtatctcctgttactttcgctttattttaaatctttttccagcttggtcctcgcattgactaccactgtattttgaagtacttcactgttttctcaagttcaataattatattttgtagaattaagaaaagaacttagtgtatttcctttacgtatctactctgatatttagatgctaactacaattaaataatatatgatttttataaaaaagatatagtaatattttgttgtgaattgtactaatttgatattttatagtattatttgtcgtgaattatatataacaaaatatattttatggatctataaaggagaatgtaatgaatacttctatcgatatacaacacttgtgtgatcttgcacataaagcatttaatgcccctgtacatattttatctgcagacagaaaaattttatatcattctacatctgataatgtttgtagtcctttttattcttcaaaagaagaacatcttagtgatatttatcaagaaaacgatccctgtaacttgccactttttcgaagcaacaactatcttgaaaattttgttctaattcatatagaaaatcatgatgatattaaagggactattataatcggtcctactatacattcaaaagattcagatgatatgatcataaaatttcagaaagaatttaaatcaaatgataacattcaagaaagacttgcctattatcagtgtttatcggagattaaaaaaactacattaattgatatgggaattttattacattacatgattttcaatgaaaagttagatgtagatattgtcttggaaaaaaataaagtactagaggaaactcctaataaaaatgtgaaacctgatttatatattttaaaacgtcgacaaaacaaacctaaaacgcacaatatggcattagtaaatgatttcttttcgactatcaaagaaggaaataaaaaaaagttaatacagtatatgtatgcggtttcgcaagaagatgttgaacttatgctagtagaggatccgctcaggaatcaaaaaaaccttggaattattgcgattaccttagccactcgatatgcaatagaaggaaatctgccaccagatattgcttttgcccatagtattttatatatacaaaccctagaacaattagataatgtagaatctgtaaagcgattatcaggggacgctttacgtacctttgcagatcgtgtgaaagaatacaatgcaaaaaagtattcttacgcggttactacatgtataaaacatattaataaaaatgtttacgatggaatatctctgaatgaacttgctaatcatttagaaattacgcctacttatctgtctaaactatttaaaaaagaaatgggaattactttaagtgaatatattcaaagggaacgagtggaagaagcaaagaaattattaacactcactacttattcgttatcagatatctgtgcttggcttaactttaatgaccaaagttattttataagagttttcaaaaaaatcactagcatgactcctaggcagtaccgtgaaaaatatacaataatataagtttgttatctactgtctccaatgtaaagacttaaacatgggtgtaagtatcccaaaagatgaaaatactgaacttattacgctagaaagagtttgtgatttgtctagaaaaagaacttgtattcaaatagacgtatgagattaaccagatattatcttgttagcggaacagtttcaatttttaggagttagaaaaataatggagaaacaaagtatatctatttttttaataacaatcatgtgctgaatttatcccgctatttgccgggcagtaagacctccatctaaaaattcagcgaaagcaaagaagttaggtggggggggtgggctgcccgtaaaagcccgattggtgtgggctaataatcagtggggatgaacaaaacccccactgattaaagttgcactttatcggtatagttctaaatcagataaactagtctgacgtcagctcaaacaaatagctcttgaagactttataaacacatatgtgagcaaaagctcaatggaaatctttgtaccatattgttaatttgaaaaaatacattaaccgttattttgctaaaggaaataaaaagacagaaggctgcaaagtgttccatggaagctttgcagcttttttgtaatttaaaacctatgtttataacgatgacaagtttatagactaatatcttcatactagatatttgttaataatgatattagaatgttatgtaaaaaaatcaataatataacatatattactaaatatatctacatgttatgcaattatgcataactaaataaaggtaaaaaagtataaaaagacctattatattattctataagtattttttctaaaataaaatttcttggttgagctaaaatagttatttttaaccgtatacacattaatttgtaatcattccaattacagaaatgaaatttacgaataactatatttatataatttttttcgggacatatttttatttaacagtgaattatcgagcttaatcgacaaaatttttctatttacgcattaaaaatttaatgttttaatgaacaacataactggtatgaccagacagaaaggagaaggttacgctaataggaattatagtgaagttataagtaacattatgtctttaataattttctaaatagtcaatttatttataagaggtcaagaatcaaattggtaataaacgtgttctaagtttctgcataacaaaagtgaagttattccgcaataaaagtataagcaatgtacagtataatttcatcttttgttgtctagtaaggagtttgctgacaaaactaagagggatattatcaaattgaaattaaacaatgttatgacaggattaactgtaagcattggtttattgatcctcacgattctgtaagttaaaccgcaactttaggaaagaattaataatttactactcataaggtgcctgattcaaatatagttaataaatttttgttatttatattttaaaaaatagagtatcgaaatgagagataaataaaatccttatatcctattagaagtaaaaaacaacgatattaacgtatctgaaagatttctccttcttatccagtttacaaagagagcggtcgtacaagttatatgaattaagttataaaaacaatggtaaaggagtgtacggaatgaaaactaaaataatgacaggatttttaataacatccattgtaactggagcaactattcctatcaatactctcgcaacaccaatcgttcaagcagaaactcaacaagaaaacatggatatttcttcatcattacgaaaattaggtgcgcattctaaattagtccaaacgtatattgatcaatctttaatgagtcctaatgtacagctagaggaagtcccagctttaaataccaatcaattcctaatcaaacaagatatgaaggaatggtcatcggaactctatccacagttaattctattaaattcaaaaagtaaaggatttgtaacaaaatttaatagttattacccgacattaaaatcgtttgtagacaataaagaagatagagaagggttttcggatagacttgaagtacttcaagaaatggctatgacgaatcaagaaaatgcgcaacgacaaatcaatgaattaacagatcttaaattacagcttgataaaaaattaaaagattttgatactaatgtggcaactgcgcaaggcatactaagtacagatggaacaggaaaaatagatcagttaaaaaatgaaatattaaataccaaaaaagcaattcaaaatgatttacagcaaattgcattaataccaggagctttaaatgagcagggatttgctatattcaaagaagtttatagtctttcaaaagaaattattgaaccggctgctcaagcaggggtggcagcgtataacaaaggaaaagaaattaacaactctattctagaagcggagaaaaaagcggcgcaagaagcgacagaacaaggtaaaactgctctagagattgaatcagcaaaaaaagcagctcgtgaagcaattgagaaaagcaaacaaggtgaaatagcagccgcagccgcagcaaaaacacaagagtatgacctgatgaaagccattgataccgaaaagattaagaaaacatttggcgtttttgctgaagtaaataaattaacagcagaacagcgagcatatttagatgatttagagaaacaaaatcaaaaaatatatgatttaacaacgaaattatcaatagctgatttacaaaaatcaatgcttcttcttacacaaaatgatttgcatacgtttgcaaatcaagtagatgtagaacttgatctactaaagcgctataaagaagatttaaatctaataaaaaatagcattacaaaattatctactaatgttgatacaactaacgagcagtctcaaaaagatacattaagacaattaaaaaatgtaataagttaccttgaagaacaagtatataaattttaatattgcgttttttgggaatccataaagattataagcatttagcgaaagaaggagaatagtcatgaaaaaatttccattcaaagtactaactttagctacattagcaactgttataactgctactaccggtaacactattcatgcatttgcacaagaaacgaccgctcaagaacaaaaagtaggcaattatgcattaggccccgaaggactgaagaaagcattagctgaaacagggtctcatattctagtaatggatttatacgcaaaaacaatgattaagcaaccaaatgtaaatttatctaatatcgatttaggctcagaggggggagagttgctcaaaaatattcaccttaatcaagagctgtcacgaatcaatgcgaattactggttagatacagcgaagccacagattcaaaaaactgctcgtaatattgtaaattacgatgaacaatttcaaaattattacgacacattagtagaaactgtacaaaagaaagataaggcaggtctaaaagagggtataaatgatttaattactacaatcaatacaaattcaaaagaagttacagatgtgattaagatgctacaagacttcaaagggaaattatatcaaaattctacagattttaaaaataatgttggtggtccagatgggaaaggtggattaactgcaatattagcaggtcaacaggcaacgattccacaacttcaagctgaaattgagcaacttcgttctactcagaaaaaacattttgatgatgtattagcatggtcaattggtggtggattgggagcagctattttagttattgcagctattggaggagcggtagttattgttgtaactggcggtacagcaacaccggctgttgttggtggactctcggctcttggcgcagctggtatcggtctaggaactgcggctggtgtcacagcatctaagcatatggattcctataatgaaatttctaacaaaatcggagaattaagtatgaaagcagatcgtgctaatcaagcagttctttcgcttactaacgcgaaagaaacattggcatatttataccagactgtagatcaagcgatattgtctctaacaaatattcaaaagcaatggaatacaatgggcgcaaattatacagatttattggataatatcgattctatgcaagaccacaaattctctttaataccagatgatttaaaagcggctaaagaaagttggaatgatattcataaagatgcagaattcatttcaaaagatattgcttttaaacaggagtagaactgaaatttaaaacctaaattggaggaaaatgaaatgataaaaaaaatcccttacaaattactcgctgtatcgacactattaactattacaactgctaatgtagtttcaccagtaacaacttttgcaagtgaaattgaacaaacgaataatggagatacggctctttctgcaaatgaagcgagaatgaaagagaccttgcaaaaggctggattatttgcaaaatctatgaatgcctattcttatatgttaattaagaatcctgatgtgaattttgagggaattaccattaatggatatgtagatttacctggtagaatcgtacaagatcaaaagaatgcaagggcacatgccgttacttgggatacgaaagtaaaaaaacagcttttagatacattgaatggtattgttgaatacgatacaacatttgataattattatgaaacaatgatagaggcgattaatacaggggatggagaaactttaaaagaagggattacagatttacgaggtgaaattcaacaaaatcaaaagtatgcacaacaactaatagaagaattaactaaattaagagactctattggacacgatgttagagcatttggaagtaataaagagctcttgcagtcaattttaaaaaatcaaggtgcagatgttgatgccgatcaaaagcgtctagaagaagtattaggatcagtaaactattataaacaattagaatctgatgggtttaatgtaatgaagggtgctattttgggtctaccaataattggcggtatcatagtgggagtagcaagggataatttaggtaagttagagcctttattagcagaattacgtcagaccgtggattataaagtaaccttaaatcgtgtagttggagttgcttacagtaatattaatgaaatgcacaaggcgcttgatgatgctattaacgctcttacttatatgtccacgcagtggcatgatttagattctcaatattcgggcgttctagggcatattgagaatgcagctcaaaaagccgatcaaaataaatttaaattcttaaaacctaatttaaatgcagcgaaagacagttggaaaacattacgaacagatgctgttacattaaaagaaggaataaaggaattaaaagtggaaactgttactccacaaaaatagggaaatattaattctgttgtaaagtgaactaaaacatagaaagtctatgattacactgttaaacagaaaagtaataattaataaatccttatataacagaaaggcggagtctcattaaagacttcgcctttcaattatatataagtatgattcgaataaagaataaccttgtagtttaattgcttttttaaaatttgcaatagaatcggttaatttgaagcagatgatatacattttctttaatacttaatgatttgaaggctgctaaagaaagttcaaacgatactgataaaagatgtagaactcattttgaaagacatcgctttttaataagattagaacttgaaaccataccttatataggaggaatacaaaatgatgaaaaaaatccctcataaactactcgctgtatcagcgtttttaactataacaactacttatgcagtcataccactagaaacttttgcaattgaaattgaacaaacgaacaatgaaaatatgtctctttcagcaaatgaagaacagatgaaaaaagctttgcaagatgctggtttatttgcaaaagctatgaatgaatattcttatttgctaattaataatccagatgtgagttttgaaggaataactattaatggaaatgcagatttacctagtaaaattgtacaagatcaaaagaatgcaagagcacatgctgttacatggaatacacaagtaaaaaaacagctttttgatacattgacaggcattatagaatacgatacaaaatttgaaaattattatgaaacattagtagaggcgatcaatactggaaatggagatactttaaaaaaagggattacagatttacagggaggaattcaacaaaatcaaaagtctgcaaaagcattaatagaagaattaattcaattaaaaaatgctattggagaagatgttagaacatttggaagtcataaagagacattgcaatcgattttaaaaaaccaaggtgctgatgtggaggctgaccaaaagcgtctagaggaccttttaggacaagtaaaatatcagaaagacatagaatctaagggcttagacatggtgaaaatcccctttattccaaccttgattgctggtggcataatgataggtgatgcaagaggtaagttaggttggctagaacctgaattagaaaaattgcgtcagactgtagattataaaataacattgaatcgtgtagttggagttgcatttcataatattagtgatatgcatagtatgcttgatagtgctatcactgctcttacttatatgtctacgcaatgggaggatttagattctcaatattcgggtgtactgggacatattgataaagctgatcaaaaagctgatcaaaataaatataaattcttaacccctagcttgaatgcagcgaaaaacagttggaaaacattaaaaacagatgttgtcactttgcaagaagggataaaaattgcagagaaaaaagaacaggattttttgaatcagcttcgtccatcaaacgtgttctacttttataaaaaaattcataacgcatacacttttgaaataaagactggaacaaatgcgccaaatgcgtcttataaagttatgaatttaactaaaaacactgttcataatatgtggagtggaggggctaatactaacatgtgggctgattggctttcattcaatccaaatgatgaatttgcggtagtagcagtagtggatggtaaagaatatgttgtgtataaagacaaagtacaaaatataatgaactgaatctgaaagtaacgaagtaattggagctggacaataaactagacaacaagttaattgaaaaatctccttatatcctagaatattttgctcaagaaaaagaatttgttcagcgaaaaagtaaatattgaaccaaggagttagttgtcttatgtgtatggttttaccgaaaggtttcaagtacattactcatacaattatgtagttatcctgaagcatctacaggtgttcttatcgaccttgaagaactacttagcttcctaagttgagtaattttatgcaaaattaagtgaacgtttttgtacatagattagttgacatttatatagtttttttccatttttaaagatagttttgttttttatgttatttttcaaaaattactgctgaaatttctatattcatcactcagcatataatcattgtttgatgaaatgacataccacgtcccttagagtttcagacatattacgataaattaaagaaaaaagataatagtagtcaacggttactattatcttttttgaactatttttcattaaaatatctcatctgctgtgccccttatttacttttctagattttatcctagtttaaaatttatgcatttgaactgtttatacaatttgtaggatttttagcttttttgtcgaatacacttaatgcaaggagggacattacatgattattaaagattatttcatcaacctttctattttttctttattagttagcgcagcaatatttattcaagtgtttacaattaattctagtcgatattttgaaaagctctatggagggattattgcagttacgttaatgttcttttcttttccatacatgggattttcctacgatcttcgagttgttcctcttattctatcttttatttactttggtcgtattgctggttggattacgttaattagcataattgtaatgcgtatcttttacacaggagggtactgggaacctcctgtgattgcttatttaggtatggggattctattttctacctttaaaacttattttaaaaaactacatccttttaaaagtgcatcgttatatttttctgtttttattggaataaagtggttagttggcgtattatttaatactacattactttacacaggaggcttattatatatagcgttaggacttttaattgggctatttcttatggaagcctaccagagattgtattatttaacacaggacttatctaaaatgaatcgagaattaaaaaaatcgaagcaagaacttgcagataccgtacatgagcttcaaggaggaatttttaaatttaaaaaagtgggtaagcactttatacacactttatgtgatggacagttttattatcaaaacggattttattctgaacaggtggtaggaaaaagcttacgtactattgatgcttctattgttcctccacatttagttccacaattgatgaagtactatcttcaggcatgggaaggaaaagaaattatatttgaattaccttggccaaatgataaaactattattcttattgcgcttaggccgattaaacgaaatggacaagttattgaagttgttggttctacagttgatataaccgaaaggaaaaaggtagaatcagaattaagcgctactaaagaattattggaatcatttataaagcacaatctagatgctattaccatttctgatcgagaagggcatattttacaagcgaataaagcttatgaaaagatatttgggtggtcatcacaagaaatcataggtaaaagattaccttgtgtaccagattttttaatggaagaatcgcttaaaaatattcagaaaattctaacaggagaatctgtggttactagattagaaaccgttagacaaaggagtgatgggagtcttcttgatgttagtctgacagtttctcctatactagatgtaagaggaaatgtgatagctttatcagcaatatgtagagacatctctgaaagaaaacaagcagaaagagaacgacatcgattacaccagcaattaagagatagtgaaatgaagtaccgtgcactaatcgaacaagcaactgatgcggtatatgtagtagagctgaatgaagaaaatgctccaagtcgatttattgaggtaaaccctgttgggtgtagaaggtttggatatagtagagaagagttgctctcattatcattttcaaatatagtaccacaagattctcaaatgatcgtaaggttattagaaaaaattaaaaagggacaaacttccttcactttgcaagatgaatatctttttccaacaggaaaagtaataacaactgagtttagtgttcgtgtttttaacttaaatgggaaaaaagttttcctaagtatttctcgtgatatcactgaacggctaaaaacagaagaattattacgaaaatctgaaaaacttgctgttgtaggacaattagcgactgtaatggctcatgagattaataatccattaactgcaatgaaagggttcatgcaattactaaaatcaacggaaagtgagaataatcagggttatattaatatagtatcatcagagattgagcgtatagagagcattacaactgaatttatggcggtagccaaaccacaggtggtaaaaatgcaacctaataacattagtgtgctaatggatcaagttttaatgctactacaacctcaagcaatgatgaataatataaaaattaaaatcgatcttaaccctggtattccattgatttcatgtgaaggaaatcaattaaagcaagtatttgttaatatattaaaaaatgcaattgaatctatgccgatgggaggagaaattctcattcaattaaatatacttgataataatcaattaagtattcgttttatcgatcaagggtgtggcattccaaaagaacgtataccatacctcggagaacctttttatagtattaaagaagaggggattggcttagggttaatgatctgttataaaatcattgaaacacatcagggaaatgtatttattgagagtgaagtgaataagggaactacagttgaagtcactctccctatttgtacacttcaaaattaatatattttttcactgaaattttttaagaaaccatataaaacgtaatgctattaaacaaaaactgaatagaactttctatcgttgtttacaagaggaaatgacaaacgcaataagacatggaaaagcgagaaacgatacaagtcttgttacaatagcatacaaatcatgtaatacttccaaaacaagattgtctgtatatgtcgaagagttatatccccgatacacttaatcaattaactatagaaactggtggaatgaaacgaaaatgtaagtatcataggaacttatggttaaatcaaaaaatctctactacggctcttactcaactgtgtagtcattttagaaatcataacagggattttattaagcatggagggaattaatcgacactttaacttagcttctgcagctgtctactgttcaaaaaataatttctgtatgttataccaaaaataaagaatgtacttttagaatttataaaaaatataattaggattaaattaaaaccttccaaaaagcctgttataaaaacatcctttctttacaaccaaaagaaaggatgtttttaatattgtaattatgcttgaaaacatttcaaatttttacttgtaattttaatgaaaaatatagtctcgcaggagattagggagaagagaaactattaacaaagaatttcataaacattaagatgctttgttaatagtttttatacctgtagcggtttgtccggtttgataatattaatcagttcttctttataataaaaccatgaagtacacctcttttaaattactacctcaaaatgcaaagtttttggaaataactattttagatgtgagatgaaaatgggggatagatacttagcatttaataaaaaagataagattacgaaatgtaatcttatctttttattaagaataatgaattgtagcttcaaggtttcagaatgacttttatacagtcgtcttcacgattattaaaaatttgataaccgtagctcgcttcttcaagggggattttgtgtgtaataatctcttttggatcaaattctttatttattattttttcaaatagttccggcataaaatgaatgacaggtgcttgtcccattttaagattaatatttctaacccaaaatgccccgagtggaaatgcattataattgccaccataaacgccggtcatttgaaccgttccatattttcttacggctttcgtagctatttgaatagggccgagagttccgccttgtaatttcaatttttgttccagaaattctaaaggcgatttttttccatccatccccacacaatcaataactacatcggcaccaccatgtgtaatttcctttaaatgttctcccatatcggggaattttgtaaactcaaatacctcaacattgttaatcttttttgcataattcatccgataatctaagtaatccactgcaattacacgtttagcaccttgcatccaagcaaatttttgtgtcattaatccaacaggtccacaaccaaggacgataacagtatcacctggctttacgcctgcgtttattacactccaataggctgtaggtaaaacatctgataaaaatagtagggattcatcttcaagctcgcatgattccggtataacaaatggagtaaaattgccaaatggaacttttaaatattctgcttgtccgcctggatgattaccaaatttctccgtataaccaaagtatccaccagaatcgtaatgaggatttgagttatcacattgactttccatttcatgttggcaatagaaacaatgtccacaagaaacgttgaaggggatgacaacacgatcgccttttttcactttagtgacatctggcccgacttcttcaacgattcccattggttcatggccgataatgtatccttgaggtaagggcatgttaccttgatataaatgtaaatcagaaccgcaaatagcggttgaagtaattcttacaataatatcatcttttttctctaactttgcatcatcaacttgtttaacttgtacttgatttggtccttgataggttacagctttcatctcatatctccttttggattatgtctcaaaacataattttatttaatctcttggtgaaatagaaatctttcttttatttactgaagggaattaggaagtatacatagtgttgttatgaaagtatgttatatcagttattctttcttatatgttttgccctactttaagaaaaaaatcaatttttattcataatctaatttccataaaaaggataattattatttcataatttgtagcatattaaaaacatcggaggtgaaataagatggcaaacaataatagtggaagtcgtaatgaattgttagttcgaggtgctgaacaagctcttgatcaaatgaaatatgaaattgcacaagagtttggtgtacaacttggtgcagatacaacagctcgtgcaaacggatctgttggtggtgaaattacaaaacgtttagtagcaatggctgaacaacaacttggtggtagagctaatcgctaagtgaattagtgtaaaatatagcgaatatgtaaatcaatttcttttgtatatgtataaaaataaaaaaccttatagtaaatggattttcactcaaagattattgataatcttctttcataatctttgagtatttaatttgtaaactactttcctaaacaataaacacgcggtgttggaaaggtgttttccatgcatagtagaaaatcttttgcaggaaaaagcatacttaaaaatttgatttcaatattgaaatcaatatttattatgatattttcgaaaggtaggaatttaaaaatgggtatattaagtggaaatcctcaaaatgaaccgttacattacggtgaagtatttgatatttggagctatcttcttgctgcacagggtgcaattgcaagtcatcaagtatttatgaatcacacaggtgatgaagacttgaagaagtttttagaaggcttaattgaaaatgatatgaattcggaaatagaagaattaaaagctcttttaaagattaatggggtcgctttaccgcctgctcctccagaacgaccagttgcatctatcgaagacattcctccgggagcacgtattaatgatgttgaaattgctgctgctgtttctgcaggattagcagctggacttgtgacatgtagtcaggtgatgggaaaatgtcttcgagaagatgtagggatgctatttggccaatttcatatgaaaaaagcgcaggcaggtgtaacgttgctacgtttaagtaagaaaaaaggatgggtagttccacctccattacatgtaagaaattccgatcaagcttaataaacaaaaataaaaagtggcgttggccacttttttattttttagatgtatcctcaagattggatttatttactgtggaagaatccatatattcctctgacatctccatagcatatttatcatggtgaatatgattgcgattttttaattcatcgtcgttacgtagcactagcctcttcatataaatatggaagaaaacttctgttccaccaataattaaagcggctataaatgaagaaagtccaatgttacgagtagcatctaaattagtaaacaaggatgttagtaaccaagttccgaaaaagcttaagccgaaatctgccattgtagcaatcatatttccgtatttaggtaaaatgaagaggtctccgattaaataggcagctcccgtaagaaaaagagaaattaataatactctaggaattgaaatgccttgaaagatactgagcatgattagcaatactgcagttatcgctgtgtatttaattaataaggcaacaatatgtttcatcattttcctccattgtttaaacgtatatggaatacaatatttcattaaaaacggattatgcttttatatagcgtaacccgttttaatcaccccttaatggtaagaagtacaacctgggtaagaagcaggcttatactatggatagtatttgcggaatatcgagctttattcataaagggtagttccattcttataatagagatgttgcctaagtacagtgttttttcatattaaacttaatattcgttggtgttttgattttgcattatattttgattcattaatatgaaaataaacaaagtatttccgcatttaatgcatctttttatctatatattttccgtaatcaggtacagcaattttatcaaattcttgaaccagtgttttgaggttcgttgatagcaattcacctgacattggtatcccatgtccagtaatagcgactagaggctttaattcttctaatttaatgactgattctttagcggctttccagtctgttgttaaataacgaggaggaccgcttatttcctgttcttgagttattactttatacagatactcctgtttcactgtaacaaaagcgtccccagcaattaaagttcggtctttctctcggaataatgaaatatgcccaggagtatgccctggtgtatgaatccatctaaactctggcatatggggaacagttccatcgataggtagtgcttttacgctatttcctaaatcaatcggttcattagggaacaggggagacattttcgctaccataccaccttcaactgttggatctggttcaggatagctttgttgtccagtcaaaaacggtatctccatttgatgggcatagactggaacatcccaatatttaatgagttcaattattcctccaacatgatcaaaatgcccatgagttaaaataattgcttttggacggctatttgtaccaaatcgctcctcagtaacagagataatttcatttgcacatttaggcattccagcgtcaactaaaacaaaatcatcggtatgcggattcccaacaaaacatatgttgacgatttgaatcgtgtagcaaaataaatcaggtaatacttcgatgccgtgaccactttcaattgaagttgctggaataaacttgtaatcacttccataattcatttccttgttcaccttttgtcccccttaatatgtttcaatacgacattatagttccctaatttctcaaatccattttgggggatttgagaaaagaattagtggggattacaaaaaacaaaaattaaggtggagacatatcgatttatataaagtgcaaacagaaaatattgatttcacaagtgtagtttttactattttttgaggaggggttatgagttaataaaaggttcatctgaatattttaacgtaggtttataaagaatacagaacagtttctaatagaaattcattaaatgaggcgattacttgtaccgatgcttttcataatcaaaggatatttaagttttgtgatgtaattgagattgattaaattatgcttttcaatagctattaacagcccgttcagtgatactaatatctcttactatctataatgatatattctattttttatctaactaacgctcttagtgtagctggtgtccttgcattgagtacttcatggtttttattcattttcacatgtttcatccgaaagaaaaacggaaatcccttctttattagagataggaaattccggttcatcttttttataaacagttcaattgtatttcaaattcacatgatgattcggtaaatcaccttggataaagtaggctttattgatagcgaatctgtatttcttgattgattaccgcctattcctcatacatcattttcctcgtcattccaccgtctacgacaaggtttatacctgtaacaaaatcattttcgctggctgttaaatacagacaggctcgtgcaatatcatctggtgttcctacacgctttgataggtgctgttcatgatcaattttacttaattttgaataatctcctgtttcaatccaacctggggaaatagcattcacggtaatcctagcttcgctaaatgaggctgcgagcgcgtgtgtaatagcaacgatcccaccttttgtggcagcataagattctgaatttggctcagacataatcgcccttgtagaggcaatattcacgatagatccaccttctttgttatgacgcatatactttgctgcttcacgtgaacccaagaaaacgcttcttaggtttgtgcttattacatcgtcccattcttctagcgaaatatcgtaaggagacttgaataactcttttcctgcattattaattaaaatatctatctgaccgtatgtttgattagctacttccattaatcgaataatatctgtttccagccttacatctgtttgtacgaaaagtgcttctttaccctgttctttcatcttagtaactgtttttgcacctgctttttcgtctatatctgctaaaataacattggcccctctgcataatgtaaagcaattcctctcccgattccatttccagcccctgttatgatcactaatttattagaaaaatccattgtaattacactccttttaaaaaaatataacgtctttattttttaatataacatacaaaaattatccttctgcataagcaatagttaattgattatgcccgtatttttattcttcactaataaaaggagtaattatctttttttcataagaagataacacaatattcgttgatggcgtaccatattgcattgaatcatcaataaattgttctaaactttctacagaatgtgttgctattttgacaatatagctaatttctcctgctactctgtaacactcaagtacatctggatgattgtagcaaaagttagataatgatttacaatttgttgatttaaacagtataagtgcagaaattggacgatttattttttttagagaaacatgtgcatggtaaccttcaataatttgttgttcctctaactttcgtactcgctcagttactgacggggaagataagtgaaccgcttccgctaaatccttcattgaaatttttgcatttgactgtaatagtcccacgatttttttatcaatttgatccataaattatccaacctttttttataaaatagaataacttaaattctttataaaataaagaaaaacaatcaaatatccttattgaacttatttatcagccttctatacttgtataaaataagggtagaaggaggcggtttacgatatgaaaaagattttattattattagctgacgggtttgaagcagtagaagctagtgtatttacagatgtactaggctggaataaatgggagggagatggatcaaccgaggtcgtaacagttggtcttcggaataaattaacttgtacttggaatttcactgtcataccggaaaaaacggttgatgatattcaattagatgaatttgatgcactagctattccaggaggatttgaagaggctggtttttatcgggatgcatacagtagagaattcttacatgttattcaacatttttatgccaagcagaagcctattgccagtatttgtgttgcatcattaacgcttggaaaaagtggaattcttgtaggtaaaaaagctaccacatacagtcatccgacgagtaaacgaaaagagcagttaaagaatttcggtgcaatagtacaaaatgatttaatagtacaagatggaaatattattacatcatcaaatccaggcacagcttttgatgttgcgtttttattacttgaaaaattaacatctaaaaagaatgctgaacatgtaaaggatcttatgggattttaggcatttatcttcttatgagtttttgatgcttgctagaagtaatgtgaaaagtcgccgtgctgtagttctatttgctgaacccgaggaaaaagaaaaagggtttgattattacaatacttataataggagaatttttatgattataacacttttcacatatattttgttaggtttatctttagcaatacccgcaggtgctatgacagtccaaatgactaaacaaggaatgagaaatggtttcgtacatggttggtttgtaggtataggaggaatgactgtagatttatctttaatcgtcctgatttatctagggttctctagtgtattaaccaatccatgggtagaaacagttatgtggctcctaggttttatatttttaatgtttattggaatagaaagcattaaagaagcaaagtcggaagttaacatagatggagaagatcctaataaatctttattatcagcttatttatctggttttatgattgctatatcaccggctaatattgtattttggataggggtctttggcccggttctagtttcttcattaggtaatgcaagtacatctacatttatattaatagctgtaggtattttattaggtatctttatgcatgatatgatcttattaagctttgttcattttactagacgttttctaaatccaacctttattaaaagagtatctatatttgccgcaatagtcctattcggatttagtggttattttggttacgagtttataaaacaagtaatgacttttatctcaaaagcatagttcttataaacttaaatagggtggttataaggtaaatgaaaaagatacgtattttaaacgtaacataattgtaaatatgttatatcacgtaggcaacccctcaggaattcattgatccctgaggggtctttaaattctttacacgtagcctctactataattgatggtgtatgagcttagctcaatagcgatggggtactacccgcattttaacgaaaatatacgctaagcaaatttcgatataaaagaagccgaattttctactttaagaaactttcggtttcaattcgttatgacattgctctatgttgttatagatatataatttaattaaagtttcaattagtttagatcatcaaaaataatgtcttttttatctaaatttcttagaacttatatatgagatgaatattaatttataagcattaaatatttgtgaagatttaattgacgaacatattttttgacttttattgaaagtggattacactataaaaattttagagaatggctatctatataaaaattacataacagtagctaatataaatccattaaataagacgattacttgtacggatgcttttcataatcaaagaatgtttaagtttggagatgtaattgaagtggattagagggggagaaataaaaatagttatctcttcctaacttaattatatcatgtaaatcaagttcgaaatagactgtttattcgtattgactcctgctacaatcaagaacacatgcatagtaaggagagatgttatatgagttctttcgttctcgattttcaggaaatagaaaacacgcagctttcgctcgtcggtggaaaaggtttgaatttaggggagttaacaaacattcaaggtatacaagtacccgaaggtttttgtgttacaacggtaggatatgaaaaggctatcgagcaaaatgaagagcttcaggctttgttgcagcaactaacaaagttgaaaatggaagagcgagctcaaattggtgaaatgagtaagaagattagagaagtaattatggcagtagaaatcccttctgatgtagtggaagcagtaactcattatctctcacgttttggaaatgaacatgcgtatgccgtgcgttctagtgcgacggctgaagatttaccgtatgcttcatttgcaggtcaacaagatacgtatttaaatattatcggagaagaagcgattttacagcatgtaagaaagtgctgggggtctttatttacagagcgagcagttacgtaccgcatgcaaaatggttttgaacataatcaagtttctatatgtgttgtcgttcaaaaaatggttttccctgaggcttcgggtattttatttacggctgatccgattacttcaaataggaaggtgttgtcaatcgatgccagctttggacttggcgaggcgctagtatctggattagtttctgccgataattataaggtaaaagaagatgaaatcgtcgaaaaggtcatcgcaatgaaaaaattagccatctatggacgaaaagaaggcggaacagagagaaagaaaattgctcctaatcagcaaaaagttcaaacacttactgaacaacagattttacaactagtacgcatcggaagacaaatcgaagcttattttggttgtccgcaagatattgaatggtgcttagttgatgatacaatttatatagtccaaagtcgccccattacgactttatatccaattcctgaagaaaatgatgagggaaatcatgtgtatatatcggttggccatcaacaaatgatgaccgatgcgatgaaaccattaggtttatcttttttcctgttaacgactagtgcccctatgcgtaaagcgggaggcaggttatttgtcgatgctacgcaacaattagctttacctgctagcagagattacttaataaacactttaggaaaatcggatctactcgtaagagatgcattaacgactatagttaagcgagataattttattaaattattaccagatgatgaaaaagggaagagtgttggtaaaagtgtgccacctgcaaattctcaaccggaaattgaaaatgatccggcaatcgttacaaatttaatacagaatagtcaagcatcacttgaagagttaaaacaaaatatgcaactgaaatcaggagtggacgtacttgattttattttggaagatattcagcaattaaagaaagtattgtttaacccgcaaagtatcgctgtcattatggctggtatgaatgcttcaacatggataaatgaaaagatggagcaatggttaggtgaaaaaaatgcagcagacacgctttctcaatccgtacaaaataatattacatctgaaatgggtttagcattaatggatgtcgctgatgtgattcggccgtacaaagaagttattacgtatttacaacatgtagaagatgatagctttttaaatgaactagttcagtttaagggtggagaagaagctcgagatgctattctaacttttctaaataaatacggaatgagatgtagcggagaaatagatattacgaaaacgcgctggagtgaaaagccaactacaattatcccgatgattttaaataatataagagattttgaatatggtgcgagtaagcggaaatttgaagaaggactgcaagaagctttgaaaaaagaagaagagttagtagatcgattacagcacttatcggatggaaaacaaaaagtagaagaaacgaagcgaatgattcgtaatatccgtaattttatcggctatcgtgaatatccaaaatacggtatgattaatcgttatttcatatataagcaagcgttactgaaagaagctgagcaacttgtgcagagcggtgtcattcgtgaagtggatgatatatactatttaacttttgaagaacttcacgaagtagtctgcacgaataaactagattacgaactgatacaaaaacaaaaaaatgattacaaattatatgaaaaactaacgcctcctcgtataatgacgtctgatggagaaatcattacaggtaaatataaacgagaaaacctcccagatgatgcgattgtaggtttgcctgtttcttcaggagtgattgaggggagagctcgcgttattttaaacatggaagaagcgaatttagaagagggcgatatattagttacagcttttactgatccgggctggacaccattgtttgtgtctataaaagggttagtcactgaagttggcggacttatgacgcacggagcagtaattgcacgtgaatatggattaccggcagtcgttggagtagagaatgctacgaaattaataaaagacggacaacgaattcgggtacatggaacagaagggtatattgaagtgttgtaatgaaataaaagaacatccgctattatagtggatgttcttttattatatagctgacttatttctttaagccagccgcataaaaaggtccatgaactgcgattgttgataaaaagcgagcaatctcctcaggtgtttctttttgtccattatttaaccattgttggatgacacctatatgcgcagatgccatataagaagttaagtattcgcttggaacaagtaaattctccttattaatgagaggaccattcgtatcttcaaataatgttttccacataaagtctttcagttttgtttggaaagataaatctcctttcggacttagtacagctctcataaaatcactattttcatttagaaatgcaagaatagaagtgataagtataaatggcattgttggagaaggatttgatccaaggtcagcaataacttctgggaatttctgtttagcaatgttagaaaactcgtacataatgtcttcttggcattttgtcattaaatcaaatttatcttgatagtgcgcatagaaagtaccgcgattaatgtttgctttcgttgtaatatctttcactgtaatggcgtcaaaacctttttcttcaattagctccaccaatgcatttcgtatggcagtttttgtacgaacaacacgcaaatctaaattattatcgcgcaaagcatatccctccttaattttactcaacacatttagaaaatgtgtcttataaccaacacattcacgatttttgattattgtataaggttcaactcgaacatataattcaaaatataaataaacaacacgttgttggttattatagatcaaattaagggaggagaaaagaaaatgtttaaaaataaacttttattgttatcaccagttattgcactacttgttgtttttattttttcattaacgttatttccaactgttcaaccaaagccgaaaaacttgccaattgcaattgtaaatgaggatcaaggtgtagaaattccaaatcaaccgaaaatgaatatggggcaaacgatcgttgataacatgaaaaaaacagcgaaatcagaggaagaacccgcagtgaagtgggtagaagtaaaaaataaagaagccgttcaaaagggattaaacaataaagagtattacgcggcattagtcatcccgaaagaatttagcgcaaaacaagcgtcgttacgaacaccacagccatcttcacctgagatagaaatatatattaatcaaggaatgaatacggctgcatcaactatggcaggacaaatattacaggcgattgttgataatatgaacaatactgttcgcgcgcaagtattagaaggatataaggaaaaaggaggtacattaacaacagatcaagctgcgaaattagtaacacctattgtaaagaacgtgaaaaatatgaatgaggtcggcaaaaatagtgcgaacggtaactcaccaatatcattgttccagccgttatggattgcaagtttagctagtgcagcgattatttttattgcgattagtaaaatgccagtaagctcaagaaaagaaaactttctgttaaaagtaaaccaaatcgtaacaggagctattgcgacacttgtaattggatttggtcttacatggattgcggatgggatggtagggttaaatatttcgaacttcacggatacagctctattcttatccattacttcttttagtttcttcttaatgatatctgcggtactttcattggttgggctaaaaggaatcggtttattcgctttattactattcttcggggcgccgttactatcgttagcacctgagatgttgtctccgttttatcaagactgggtttactcatggttaccaatgaaatttatgattgaaggcttaagagaaatcttcttcttcggaaaaggattaagctggaatacacctgttactgtactcgtttggattggtatagtaagtatggttactatattagcaactgcattcaaacgtagtgcagtaaaagggtataaaacagaattgaacgcttaaaaaaaagccgtttcactaattgaagtgcaccccaattgttagacacagtctaacaattggaggtgcattttttataaataccctatagaatagacttttttcaagtgtctattctatagggtacattttagtgaaagcctcttcctttttagcattttaatttgttttttgttctttaatagacttcactaatttcatcatttccgctcgtatatcttctctttttacatttaatttttcggcaatttgtttaatgtccattccatcttttttcatttttaatacatcatcaagaggggtattgcttttttgagagatgattgttaacacagtaagatgacgcaatttgatgttatattctttcattttttgctttagctgatcaggtgtggatttttgcatagttgctaactgttgtagcagtgcttgctttgtttctttattcatatgatgctttttcagcttacttggatctacaccgaaatgctcggctgttttctcccaagatttattttgcttatagtaagctaaaacatcttttatttctttattactaattcttgcaatatgagcagctttccaaatttcatgtttgttatagccgagtttttctagcgattgcatttcttcttctggaattggtttatggtgatgcattgttacttcttttggtgtggcagcggatgtagggaaggtggatatcccgcataataatgctgccatagtcatacaaacagcgatttttttgtacatgtaaactcctcctagatggataatgtagaaaactgtacatatatcatttccataaaatgtgaaatacttgtgaacaaatcaagtttttttattcacagtatgaaatgacgtttttagaagttttccaacataaaacattgattaatagtaaaaaactaaggtataatcgaaattgaaaatcaatatcaatgatgacgataaacttatacatatagataaaaataagggagagataaatatgactacatatacttccatcgctaatgtgattaaagaaagacgctctgttcgtacatttacagacaaagcagtagaaaaagatttattaattgaactattaaacgatgcaacatgggcaccaaatcataagcaccgtgaaccatggaattgtaaactatacatcggagaaggccgcaagaaattagtagatgcagtattaaactcttttacggaagaagaaagagcgaaacgcggtaaaattttatcagatcgttttttaagcacgcctgcacaaatcgttgtatatataaatgaagatccgcgtcaaattcaacgtgatgaagattatgctgcaacatgtgcattcatgcaaaacttccaacttcttgcttgggaacgcggattaggttgcgtttggaaatcaggcggattaaactacaatccattatttatagaaggaatcggtttaacaagaggccaacgtatcgttggaattcttcatatcggctatttcgataaagcgccagaaggaaaagcacgtactccgattacggagaagatggagattattgaaggttaatagatgagacattctcgtttttgcgggggtgtctttttattatgcaatcaatcctcatgaaagcttgttcttcatcatacactttcttaagggaaagtgtaaggagggaaaataatgagagcaagtgacgataaagcactgcaatatgcgattgcggaaattacggaaattgcgactggatttgggcttgatttttatccgatgcgttatgaaatatgtccagcggaaattatttatacatttggtgcatatgggatgccgacaaggttttcacattggagttttggaaaacaatttttcagaatgaaattacaatacgatttaggacttagtaaaatatacgaactcgttattaactctgatccatgttacgcctttttattagatacgaactctttaattcaaaacaaattaattgtagcgcacgttttagcacactgtgacttcttcaaaaataatattcgtttttcaaatacgaagcgagatatggtagagagtatggccgcaacagcggaccgtgtgaaagcttatgagcataagtatggaaaagcagaggtagaaacatttttagatgccgtacttgccattcaagagcatattgatccgtcgcttatgcgtccgaagctcgcatggagtattgatgatttagaagaggaagaagtagaaaagaaaaaggtatcgcaatacgatgatttatggaatttagataaccgaaataaaaaacaagagcgctctaatatacgtaaaaagaagaaaatcccaccgcaaccagagaaggatttacttctctttattgaagaatatagccgtgagttagaagattggcagcgtgatatattaacgatgatgcgcgaagaaatgttatatttttggccgcagcttgaaacgaaaatcatgaacgaaggctgggcatcctactggcatcaacgcatacttcgtgaaatggacttaacctctgatgaagcaattgaatttgcgaaactaaatgcaggtgtcgttcagccatcaaaaacaagtattaatccatactacctcggtattaaaatctttgaagatattgaagaacggtacaacaatccgactgaagaaatgaaacgacgaggcgtaaaaccaggatctggccgtgacaaaatctttgaagtacgcgaaatcgaatgggatgtatcgtttttaagaaactacttaaacaaagatctcgtaatgagagaagatatgtacttattccagcgccagggaaaagaatataaagtaatagataaagagtgggaacatgtacgtgatcagctcgtaaatatgcgtacaaatggtggattcccgtatttagtagtagaagatggagactacttaaagaacggagaattgtacattaaacatagttacgaaggaattgagctcgatttaaaatatttagaaaaagtattaccatatcttcatcagctgtggggaagaacggtgcatatggagtcgattgtggagagtaagggtgttgtgttttcttatgatgggaagatggtgcatcggaagtatgtgtgaggggaagaacggacataggatactgtgtccgttctttttatttggaaccaagttaaatatgctattcttgaaaaaagggagttatatagagaaatggagtgatttaaatgagcaaaataggggtatgtaaggttgatattacgccgcctgtaggtattgattttgtcggatatcatagagagacaggaataaataatattgaagagcgtatttatgggacagtttttgtatttgaaaaagatgaaatgaaaactgtgtttataagtatcgataatattgggatgttagtagaagatacgaatatgattcgtgagcgagtagcaagtagccttcatgtgccatttgagcgaataacggttgtttatactcatacgcattccggtccagagacagtcggtgatgatccgctagtgcagtcgtataaaatgattttagtaaataatgtagtacatggtgctgttactgcaaataacaatttaaagcgatgcgaagttggatggggtgttacgacaggtgatatcggtgtaaaccgacgagagagaacatctgatggaaaagcaaagatgggaacaaatatagatggtgttgtcgataaacgaattggcatgttagcaataagagatgctgaaacgaaggagttatctggggttttagtgttttgtactgcgcatccgaatgttttaaaaggtgatagtgatgaattatcaacggattatcctggaatgacgagagagattctagagaagttagtgaactgtcctattattatcgttcaaggtgccgctggaaatgtgaatgcgaaatatcgcggttcaagggaagcgttaaaacaaatggcttacatacttagtggacatgtattaacgatgttaccaacagttacatatagtccaattgtaaaattaaggacagtttcaagtatgatgcaaatgaagttgaaggatattcctgaaattgatgagatacgaagcatggctcgattagccgagaagcagtggggcgtgaatacggatgaatggcttgctatcgtattagagaaatataggcaaggtattcggaagttacgtatagatttagaagttcaactgtttcaagttaatgatggtatgttttcaggtataccgatggaacctttttcagaaactgccttagcaatgaaagagagccttcaaaatgaattggctttctttggtggatatatgaacggatatcttggttatttaccgacaaaagacgaatatgcatatggcggatatgaagtagaattaagtcctattgtgtatggaacagttacaaatttgttaatgccaccgggagagaatactgcggagttgattgtgaaaaaggttatggatttatgtaatagggtgaaactttaatgagacagatttttgaacgcagagtaaagaatatgactcattgtttgattttgttaagtcaatgtaattaataatgataatcattattaattacattgacttctaaaaaaagaaaaactagaatttataaagggatcttcaattgttcgctatcatttgtataggaggtaagttatgttggatagctttatttctataagatgtaggttggctctttatagttttggtgttctttttatctttttttgtacagtatttttggtgaatcagaaggtgtatgcagaagatgtaccgtggacatcagtttcaaatgagggagaacgtgtactttttcaagaacaatctttgtatagtaatgatcgaaggggagaagatcttgtttcaccttcatttgaagggcgtaaacatggtggggaagattggggatacttattaagagacagtaattttaattatccatctaatatccttacacattctgtaataggaagagatgatcgaattagagttactaatacaactttgtatccttatagggctatagtacacttagtaattcaatttaatggacaagaggtttatgggtgtacaggagcgctaattagtaaagatacagtatttacagctgggcactgtgtttacaataaaaagcttggtggatgggcaaaaaatgttattgtgactcctggtagaaatggagaccaagcaccgtatttgccttatagttggacaaagctttattcagtaagtggatggactgatgatggagattcggaatttgattatggagccattaaattaaatggatctcctggagattatacaggttggttaggatatagaactactaatgtagagtctccaaagggattactcgcagtagttccagggtatccatgtgataaagtaggaaatgaaaaatatactatgtggacagattatggaccaattgaaggcactagtcctagaattttaacatataggatggacacttatggatgtcaaagtggagcacctgtatatcatgactattctcgtacgggtgtaacaataatagctacccatacagtaggaagtaattcttggaattctggaaaccgggtgacagacgatgtttttaataatcttaaaaaatggtctgaataaatataataagcttttatggattttattttgtgtattggtcataatcgtaatgactagttatatagtaaataatgaaaagaagtttagtaaggttgttaattctgtaacttttcacgtgaaaaataaagaaaaacagccaataaaagattttgaaattatacttatgaaagacgaatcacctgaacccagtaaagaaattgggatctcaatagggaaaacagacgaagaaggaaaagttatttggaggaatgtgagaaagggaaaatatatcgtatttttgccaaataacgagacgcagatggttatgattaatgatagagatgcaacgaaaaaaataaatatatcattgtagaaaaagagtccattgggattcgttttctcaggttgtggcattaaagaattttacgtggaatggatttaaccttatgtgaagaagctattgattttgaaaatttaaatacaggtgtatttaaattttcaaaacacgtatttatacattggtttaatcgtgcagaaagttatagaactatacgcaaaagaacttggaggtatctaagttcttttttatttgtttcaaatttgtgaaagaaagacatactgattgaaattaaattttttatactctatcatatacccatacaggtataggtttttgtttaatgcatgaggaaattaaataataaataacatggaggtttgaaatatgtctagaaaaattgttgtagtaggcggagttgctggcggggcatcagtagctgcaaggcttcgtcgtttaagtgaggaagatgaaattattatggttgaacgcggtgaatacatttcgttcgcaaactgtggattgccatattatattggcggtgtcattacagaaagacaaaagttattagtacaaactgttgaaaggatgtcaaaacgttttaatttagagatacgtgtattgagtgaagttgtaaagattaataaagaagagaaaacaattacgataaagaatgtaactacagatgaaacatataacgaggaatatgatgttttgattctttcaccaggggcgaaaccaattgttccacctattccgggcattgaagaagcgaaggcgttgtttacgttacgaaatgtacctgatacagatcgtataaaagcgtatattgatgagaagaaaccacgtcatgcgacggttattggtggaggatttattggagtggaaatggttgagaatttaagagaacgcgggattgatgttactcttgtagagatggcgaatcaagtaatgccaccaatcgattatgaaatggcagcatacgtacatgaacatatgagaaatcacaatgttgagcttgttttagaagatggtgtagatgcgttagaagaagacggggctattgtacgtttaaaaagtggctcagttataaaaacagatatgattattttagcaattggtgtacaaccagagagtagtttagcgaaagaggcaggattagcattgggagttagaggaacgataaaggtaaatgagaaatttcaaacatctgacccatatgtatatgcaattggtgatgcgattgaagtgaaagattttgttacagaaatagaaacgatgattcctttagcgtggccagctaatcgtcaaggtcgcatgttagcagatattattcatggtcatacggattctttatataaaggtacgatgggaacttctgtggctaaagtttttgatttaacagttgcttcgactggagtgaatgagaaaatattaaaacgactaaatataccctatgaggtagtacatgtacaggcaaattctcatgcgggatattatccgaatgctacgcctgtgctaataaaattaatttttaataaagaaagcggaaaaatttatggagcgcaggcgttagggcgtgatggtgtagataagcgtattgatgttattgcaacggcaatgaaggcaaacttaactgtaatcgatttgccggatttagaattatcatatgccccgccctattcttctgcaaaagacccagtaaacatggtggggtatgcggcaagtaatatagtagatggttttgtggacacagtgcaatggcatgaaatagatcacattgttaaaaatggtggatatcttattgatgttcgagagcctaatgaactaaaacagggaatgattaaagactctattaatattccgttagatgaattacgtgatcgattggatgaagtgccaatggacaaagaaatatatatcacttgccaacttggtatgagagggtatgttgcagcgcgcatgttaatggaaaaaggatataaggtaaagaacttagatggtggctttaaattatacggaacagtagtaccagaacgtgttgtatattaatattttttcatcttccacttcaaaatttggtggaagatgaaagcctatatagtaaggtttcacttcttgttttgtgaacatataagataaatattaaaaataggggtttacaaaataccctatagggtataatatattgtcataggttataaatagtgacataatggtaatgaggtgattatagaatggaatataatcaagatatgaaaaatagattgaaacgtattgaaggtcaagttcgtggtgtacttcgtatgatggaagaaggaaaagattgccgagaggttattacacagttaacggcatctcgttctgcacttgatcgtacaattggacttgttgttgggacaaatttagagcaatgtttgcgtgagcagtttgaaagcggtaatgcttcaaatgaagagttaattaaagaagctgttcaattacttgtaaaaagccgataatctgtcagacataattgttgacagattttcaaaaacattttaatatacccatacaggtatatgtatataagttgtggaggaatcaattatgagtataaaagtggatatgagtttagattgtaaagggttggcttgtccgatgccgattgtgaaaacgaagaaggagatagaaggattagcaccagggcaagtaattgaagttcaggcaacagataaaggatctacggtagatataaaaagttgggcgggtaaagtaggacatcaatatatcgggacgaaacacgaggataatgtattggtgcattatgttaggaaagcaaacgagcatgaagtgaatgaaattgtgaaatatccacatacaattacgaatgcagaattacagtctatattgtctcatggagaagagagcattgtattagatgttcgcgaagcagcggaatttgcttttggtcatattccatccgccatttcagtaccattaggtgaattaaacagcgcagtattagataagacgaagcaaatttatgttatttgccgaactggtaatcgcagtgatatagcttgccaaatgttgaaagagaaaggttattcaaatgtgaaaaatgtcattccaggtatgttagagtggcaagggaatatagagaaataaatttttttgaataaaaatatacctatgggggtaatagagtgagtgttaaaccgttacaagcaaaagatgtggcagagaaagtgttattcggagagttattcattttagatgttcgtaatgaggcggattatgaagattggaaaattgaagggaaacaagtttcttctattaatagaccttactttgacttgttagatggtgtagatcatattgtaagtgaattacctaaagataaagatgttttagtagtatgtgcaaaagaagggtcttctatatttgtggcagagcaattaacagaggctggattagaaaatatttattatttagctggtggcatgaaggcttggagtgaatatgtaaagcctataaaagttggagatttaaaaaatggtggaagtatgtatcagtttaaccgccttggaaaaggctgtttatcttatatggtcgtttcaaatggtgaagcagcagttattgatgcagtaagaacagttgaagcatatgaagaatttgcgaaagagcatggcgttacgattacgaatgtaatggatacacatttacatgcagaccatatttccggaggacgtaagttagcggaaaaggtaggtggtacgtattggttaccaccaaaagatgcagaggaagttgttttctcatacgaaccgcttgttgaaggatctgttattacggtggggggtactaaaattgtaattgacgcattatactcaccagggcatacgattggaagtacgtcattcattgtagatgattcttatttattatcaggcgatattttatttgtagattcaattgggcgtcctgatcttgctggtaaggctgaagattgggtgagtgatttacgtaatactttgtatagccgatataaagagctatctcaaaatttagttgtgttaccggctcattattcaaaaataagtgaaatgaacgaaagtggtatcgttagtgcaaaattaaaagatttatttgagcataatgcaggattaaatattgaggatgagggagagttccgtaaagttgtaacagaaaacttaccacctcagccaaatgcatatgaagaaattcgtcaaacgaatatggggaaaattcatccgagtgtggaagaagagcgtgaaatggagattggcccaaatcgttgtgcagtgcatgagtcattataaaaataacaaattggaggaattgatgatgaatataaaacaagtattagatgcgaaaggtttagcatgtccaatgccgattgtaagaacgaagaaagcgatggatactttgcaaactggagaagtgttagaagtgcatgtaacggataaaggatcagttaaggatattccagcgtgggcaaataaaggtggtcatgaaatcgtaaagcatgtagaagaagctgatgtgctgaaattttggattaagaaggcgtagtaaagaaataattttataaatgtagagggggagttatatgaacacaatattaagtacgcttttcatggtacttgctacatggtttgttatttcgcgctttttaccagtgaaaggtgtgcaaaatatcagcggaaaaaaattaaagaatatagtggaaaaaaaggggaaacaacttatcgatgttcgtacagtaggtgaatatagaggaaatcatatgaaaggatttcagaatatcccgttaaatgagttagctagtagagcaggtcagttagataaaaatatggaagtaatcgttatttgccaaagtggaatgagaagtaagcaagctgcaaagatgttgaaaaaactagggtttcagcaagtaataaacgtttcaggtggtatgaatgctttgtgaggagggactttaaaatgaaagaaatgacagcaaaagaattagaagaaaaattgttacgtaaagaagcagtaaatatcgtggacgtacgtgaagtagaagaagtagccgaagggaaaattccagaagcgtgtaatattccactaggactattagagtttcgtatgcatgagttggataaaaagaaggagtatattatcgtttgtcgttctggcggaagaagtgcacgagcagttcagtttttagagagctacggttttcaagcaattaatatggtaggtggtatgttagcatgggaaggtaaagtcgtatagtacagggatacatgatttgagcctttttataaatgataaaatacccctataggtaatcggagggagaacaacatggaacaacagaagaaaacaacaatcgttttatttagcggagattatgataaagcaatggctgcttatattattgcaaatggtgcagcggcgtatgatcaagaggtaactatttttcatactttttggggattaaatgctttaaggaaagatgagcatgtgaaggtaaagaaaacttttatagaaaaagtgtttggaaaaatgatgccacgcggtgcggataagatgggattatcaaaaatgaattttgcaggtatgggaccaaagatgattaaaggtattatgaaaaaacataatgcgatgcctttaccagatttaatcgatttggcgaaagaacaggggattaaacttgtcgcttgtcaaatgacagtagatttattagggttaaaagaggaagagattatggaaggggtagagtttgcaggagtaggagcttatttagcagatgcttcggatgggaatgtaaacttattcatttaattcatcttctttctagaagggaggggatgtaagatgagcttagtcgtattactttttataattggatttataggatcgtttatatcaggaatggttggaattggcggtgcgattattaattatccgatgatcttatacattccggtattgctaggattttctggctatacatcacatgaagtgagcggtattacagcggtacaagtattctttgcaacttttgcaggcgcttgggcataccggaaaagtaatgacatgaataaaacgttagttatgtatatgggagctagtatattaataggaagcttcatagggagtttcggtgctaacatattagaggaacatacagtcaatgttgtttatgcagcattagctacaattgcagctattatgatgtttgtaccgaaacaaaataatagtggagatgtgaagtataataaatggttagcaagcttgttagcgttcgttgtagggggagcttcaggcattataggagctggaggttcgttccttttagttcccattatgctagttattttaaaattaccactgcgcatgacgatcgcaacatctatcgctattacgtttatttcctcaatagggattactacaggaaaaatggttactgggcaagtagttatcattccagctctaattattgcggttgccagtatatttgctgcgccacttggagcacgagtcgggaagaggctaaatcaaaaagtactgcaatatgtattgtccactttaattgtaggcactgctgttaaaatgtggatcgatatgatatcaaaataaaaggatggtgctgcttacagcccatccttttatttattgcccgtaaacctaacggattatagttttactttatgcccaaataactttcattaagtttttatattcgtcatttgctaatttatatagcattctcgtatgttcaaagacaagtgctggattaaagtttggttctgagaatgcaagagatgttgaaatatcaattgcattttgcttatttaatgtgaattttgcaaagcgataagatgtatttaattcattgatgacatgtaaaatatcatttgttgatgttgcatcaggcacgtgagcaacattgaagcagtatatatccaccgtaggatgttcgttttggaaagcagcgataagttgaatctttgcgccagcttcagtctctaatcctactgaaaaatgaacagagccatcattttcatctatattttcttccatgtatatatcgttagattttaagtagtctttaaaatctgagatgttatgttttactgcagctttcatatgtatgagccccctgataattggaatagattgctactatttattataatttaaaaatattaaaaaagatagttagaaagttctgatttttatatttggaagaataaaaagaagcggttctctacctccatagagaaccgcttctatattattcattgtcattagacgatgtttctgtatcttcactgctatttttgttcttatttttcacttcattgttatttgattcgcgttcacttgaattttcagacttagattcttttgtctttttcgaatcagagtttgagtcagactttgtatatgcaggtagcccaagatgagtacgaagttcatttgtaacattagctaattcttttttatctggattgtagtagtaagttcgaccaccaccagcagatttgctacaagtatcgtcaccttttgccatatagcaatcatcaccttggatttgtaatttctcaatttccgaatccgatccatatttatagaatgaaagcatatcatcaaatgttaagtttgtaacgaattgtccgttaatatcatcaatgatgttgccaacttttgttacagaaccaacacttgttagtttctttaaaatagcttcgataacgagttgttgacgttgtccacgcattgcatcactatcgatgtgtcttgttctagcaagagcaagagcttcttcgccatttaacttttgaacacctttttctaggtgaattgcctctgcattatcattgctatcttgctcagtaaattcaactggtacatcaacttcaacaccgcccaagtcatcgacgatttttataaatgatttaaagttgaattttacaaaataatcgacaggaacattcattaatttttcaactgcatcaatgcttgcttgtggtccaccattttttccgtttttagcagaaccgaatgcatgagcgtgtgtaattttatcttttttcttttctattggaatataagtatatgtgtcacgtgggatacttaatagtttaacagttttgctatctttattaaaagttgcaagtaaaagcgcatctgttcttatagcgtcaccatattcttttcctcggacatcgctttcatcaacacccattattaaaacagagacattgttcgtaataggtttaacagctttatcacgtaaatcagatttatcaccgcgtgctaaatcgtgtgcggcatttcgaacagcagaagatgctttatttactaaaaaccaagtataaccgccgcctattaataaaacgaatagtatagcgcttataataacttttatttttttcttattttttttcgggttactgcgtgtattttcttgcaaagatgggttttgctccatttcctgtactccttcatttggattgaaatacgacactcatatccacttattataatgaaatttagcgaaaaaaaacattacaaatcatttacatttcgtaaaaattcaatttatttataaaaagtcagattttctatatattatttgtcagatgtagaataagtataagggcttttagtagaaatgaaaatatatattatgagaaagtgatagggaagtaagatttgttgaaatatagccaagaagaaatgagtaagcttacttattttttctatataataaggaagaatttgacggataaaggagagagcataatgaatcatacattattccgagcaatcgttgtgaatgaaacggaaaatcatcagtttgtaagtaaagttgttgagagagaagtaagtagtttacctgagggagacgtaatcatacaagttcattattcttcattaaattataaagatgctctttcagctactggtaataaaggtgttacgagaacatatcctcatacgccgggaattgatgctgcaggagaagttgtgagtagtgaagataactcttttaaggtaggagatcaagttattgtaacgggatatgacttaggtatgaatacctctggtggtttcggagaatatattcgcgtgccatcatcttgggtcgtgcctttaccagaaggaatgtcattaaaggaaagtatgatgtatgggacagcaggttttactgcggctttgtcggtatataagcttattggagcaggaatcaagcctaatatgggagatgttttagtaacgggtgctacaggcggcgtagggagtgtagctgttagtatattaagtaagttagggtttaacgtagtaggagcgacaggaaaaatggaagagaaagatatgctactacgtctaggagcgaaaaaagtgattcatcgcgcggaattgaatgatgaatcaagaagaccgatgttaaaagggatatacgccggagttattgatactgtaggtggacgtatgttagaaacagctttaaaaacagtaaagtatggtggttgtgtaacgacatgcggtaatgtggcaggtcaggaactacaaacaacggtatatccgtttattttacggggcataagccttttaggggtagattccgtgcaatgtccagtagatgtgagaagagatgtttggacgcttttagcgaatgaatggggaaataaagagttactgtcttatatagaagaatgtacattagaagaattagagaagaagtttacacttatattgcaaggaaagttaaaaggaagaacagttgttaaaatataatgaaaaaagagacgcttacgttagcgtctctttcttattataatgattgttttaaattgatttttccttgttcacctaaaacaccgtcagcgatatttacagcgtgatcgccaatgcgctctaagttacttaccatatcgacgaagatgatacttgcatcacctgaacagctgcgttcgtttagacgtaatacgtgacgtttacgaagaacacgttccatttggtcgattttgcgttcttttgcaataacagtttgagctagttcagtatcgaagtttgttaaagcttcaactgagtcttgcagtgttgaaattgttaactcaagcatttcgtttaattcagctaatgcttcatctgatagtgaaacacggtttgaaatttggaaatctacaagttctacaaggttttctacatgatcaccgacacgttcaatatctccaacaacacctgctaaaacagaatgtttttcagaatccgtaggtgaaagtggcttttctgatagtaaaactaaatactcggtaatttttttatctaaattgttaatagctccttctaattgagtagccatgtttgcgtgttttttgtcttgtgtatttaaaaattgatttgcttcttttaatccatgtaatgagaactcagccatacggataatctctttttgagcttcagttaaagcgatggctggagattgttcaataaagattggatttaaatgttgtggtttgaagtcaatcgctgcatcttcaccacgaataatttttgttacgatccatgctaacactgcaatgaacgggaattgaatgattgtatttgttacgttaaatgttccgtgtgcaaatgcaatagtcatttctggattcaagtttaatgatgtttggaaatattgaattaaacttgtaaatggtactaataaaattgtaaagataattgtaccgataatattaaagataacgtgaactaatgctgcacgtcttgcggcaatagaagtaccgattgctgctaatacagctgtaattgttgtaccgatgttatcaccgaataatacaggaagagctgcttgtaaatcgattgccccttgaccgaatagttcttgtaaaataccaatagttgcacttgaactttgtacaattaaagtaaagactgtaccaacaacaattcctaaaattggattatcactcatgctaactgttaattcttggaatgattctaaagaacgaagaggtttcatacctgcgctcattaattctaaaccgaagaataacataccaaaaccgaatacaacttgacctacagaatgtacttttttatttttaaagaagaatagtaagattgctccaattgccataactgggagagcatattctccgattttaattccgataataaatgcagtaactgtcgtaccgatgtttgcacccataataacaccgattgcttgtcttaatgtcataaatccggcacttacaagtccgactgttaaagcagttgttcctgaactggattggattaatacagtaactaacatacctgctagtacacccataagtggatttgttgtaaaacgatctagaatatcgcgaagacgatctccagctgcttgttgcagtccatcgcccatgtatttaatcccgaataagaaaatacctaatccaccaatgaactggaagatcatatcttgaacattatattccacgcattccactccttaaatttcatgtacgatgtaattattaactgaaccttgaggcactgtaaacggtttgctagtaaaatttacactaaatttacaaagagaagaaaagtttacaatcccttaaagaaacagctgtgttttattggtttttatcttgtataaatcttaattttgtaaagaaatcacactttttagaataatattgttcagtcgaatattaaggaaagcgtctgcgagttcatcgtatattttttgatgaatgttaaaaaaatatgtaggaaaatgcatgtagttttataacagcaaaacgaggggaaataattcttttaacacgataaaaaagccactgaattatccagcagctttttccgtgtttttatcgccatgcttttgttttcttatgcttgtaatgtaaatgaagagaaaagcaataagtaatagagaggagtaacgatatacagttgcatagtttgtaaaatgagcaataaatccaaatataatcgctccagcgccgattccaaggtcaaatgcggagaagaatgtagccgttgctacgccgcgtcgatgcggtgctacgcggtcaatcatccatgcttgtagtgcaggttggatcgctccaaaaccacttccgtaacatgctgcagcaataattaagctcggaattgtcgtcgtatacgacaataaaataatgcctgtaaaagttataataactcccggaatgatgacgaatgtatggcctttcgcatcatatagctttccagagaatggacgagttacagcgattgctagtgcgttacataaaaagaagagactaatatcagctatgccgacttctgtagcaaatagagtgataaaacttccgattcctccgtacattaatgtaatacataatattaataatgaaggaagtaaagctttacgctcaataaatccatcgagaaaagtactagatgattgttgtggaggctgtttcgatttttggatttgaagtagtttcgttaatattaatgaaacaattgtgcacgataatgcacataaaaaaagaattgtgaagttatatgtttgcataagccatagtccgataagtggaccgagggccattgcaattgttccagaaaggccaaaatatcccatgccttctccgcggcgagctgagggaattaaatcagaaacgacagttccatatgtagtcgttgtaataccgaaaccagctccgtgtaaaatacgaacagcaagcaagagaaagatagttgaggcgaaaaggtaactgcccatagcgagtaaacagatagcagtgccgatcattaaaatgatttttttattgaatttttgcaaggcgttcccagttagcggtctaacaaaaagtgccgcaacggtaaacatgccgacaacaaatccgatattggaacttgtgccaccaatttctttcacataaacaggtaaggttggaattaacatttgaaaccctaaaaacatacataagtttgcaaaaattaaagcaacaaactctttcgtccataacggttctcgttttacgagtattgcttctcccatatattcatcccctatataaagttttctcttttctttcgagtatatgtattggccaatgcaacagtcaaggaaggtgtcttgaaaacggataacaatttttaagatgaaaaactgacaaatttgtgtaaaagctacacaactatgaaaaaaagatgtaaagtatagatgtatagacttgtaggtgttaagaatgatagaaattgttttttctttaaagaaagcggattcaaaagagtagtgaacaagaaggggatatatactttttcactacatatatttgaaaaggtttacaatatgatgaagaaagaggcgtgtacatatgagacgattaggtatttctatttatccagaacattcaacagtagagaaagataaggagtatttaacattagcaagtaaatatggatttacacgtgtgttcacatgtttattatctgtggatggagaaaaagagaaaattatagaagaatttaaagaaacgatctctcatgcgaatgcattagggttccaagtattagttgatattagtccatctgtttttgaacaattaggtatttcgtataatgatttatcattcttccatgaattaggtgcgtacggtattcgtttagatgttggtttctcaggattagaagaatcaattatgacttataatccgtatggtttgaaaattgagattaatatgagcaatggtacgaagtatgtagataacattatgagtcatagaccaaatcgtgaaaatttaattggttgtcataatttttatccgcatcgttattcaggattatcatacgatcatttcattaaatgctcgaaacaatttaaagattacggtatgagaacggcagcttttatttcatcatttgatgcaacatacggaccttggccagtaacagaagggttatgtacattagagcagcatcgtgaattaccgatgacaacacaggcgaagcatttattcgcgactgaattaattgatgatgttattattgcaaacgcatatgcgtcagaagaagaattacaagcactaggtgcattaaataaagagaaacaaacatttgatatagaaatatatgatacaacgacagaactagaaagaattatcgtattagacgaaccacatttttatcgcggagatgtatctgaatatatgattcgttctacacaaagtcgtgtgaaatataaaaaagaagaatttaaacctcataatacgcgcgaaattaagcgtggagatttattaattgataatgaacaatatggccagtataaaggcgaattacaaattgcattaaaagatatggtgaatacaggaaaaacaaatgtagttggtcgaattgtagaagaagagattttcttactagactatttacaagcatgggataaattcggatttacattaaagaaatagagagaatataaaggggaaaaactactgatttcagcagcttttccccctttatatataaagagcgagaggaagagctatgacaaaggtgcatcagcgattaatttctattttagaggaatttttagaagagaaatcgatgttaaatcgagcttttttagcaggccgtttacatgtatcaacgaagacgattcaaaaggatataaaattattaaatgatatattggaagaaaatggagcgaaaatcgaatcgcaaagagggaatgggtacgaattagaaattatacaaaagaagaaatttgaaaacttttgtgtgagtctatttcaaaaacagacggaaaagatcccaacttcttatgaagaaagaatagcgtacattctgcagcgtgttttaatgacagagggatatgtgaagctttcagaattagcggaagagatgtatgtgagcaaatcaacggtcaatttaattatgaaagatgttacagatatatgtggttgctatgaattacaaattgagaagagaccgtattatggtatacgtattgttggagaggaatttaatattcgttcttgtttatcacaatatggtttaccgcgttatgatcatactccgtttcatgagcaatttgagcagacggagacatatttatcgctacctcatatatcactcattcgttcaattatattaaagtatattgaaggcggaacaatatatttatctgatatagaaattgataatttagtcattcatattgcaatcgcattaaagcgttgtcaaagtcaacattatataaaaggaatgcatgcggagcaatcagaacttatactaaagaaagaatatacaattgcgaagcagattttaggagatttagagaaagagttgaaattttcatttccagaagaagaagtattatatgtgacgatgcatttattaagtactgctgttacaacgagagatcgctatgaaaatgtagaagagctattagggaaagatatatatgcatttatgcaacatattctttttaaagtagcggaagaacggaatcttattttttattatgatgaagaattattatttggatttggtattcatttaaaaacgttattaaatcgtttgaagtataagctaaatacgagaaatcctcttttggcagaagtgaaaaagaattatccgtatgcttttgaaattgcggttctcgttggagatatcattggtgaatatacgggtgaatcgatccctgaaagtgaaattggttatattgcaattcacttcggcggagcgatgagccgtttgcaggagcaaaatcaaaagaaaagatgcttattagtttgtgcgactggtcaaggaagtgcacaactattaaaatataaaattttatcacagttccgagataaattagagattgtaggtattacaggctattatcaattgaaagtagaagatctttataaagaaaaaatagattgtattattagtacgattcatataccgagtggtttgcctgttccagttataaaagtgaattcaatatttgatgaaaaagagattaaatcgattggtcagcggttgtttacgcatgtgaatactagtgtgcagccttatattaaggaagatttaatctttttaaatcataatgcttctacgaaagaggatgttattcagtttttatgtgagaaagctgctgagaaacgctatgtaccagaaaacttttatgcttctgttatggaaagagaaaatacgtctccgacagcggttgggaattcagttgcaatcccgcatccgatgcagttattaagtgaggaaacttttctgatgttttgcacacttgaaaaggctgttgattggggagataaaaaagtacaagtaattattttatttagtgtaaagcgcaataataatgaagatttgcaaaggctttatgattttttatatgatattatgtctagtcaaactacgatagagaaacttactcagaccgaggtaattgaagattttcaagaaattttattatcattttgaaaaagtatataaaaacttccgttacataacggaagttttttatgtttaattgtatgcgttttcataataagataaaaatatagaaaacatatagcttgggggaatttaaaatggctgatatgcaaactccatttgcgttaattttacatggtggcaatgcgagaagcgcggcgcttgaagcaattgcttttgcaagacaaggagatttcgggaatgccggtgaaaagatgaaacttgctagtgaggaaatttcagcagcacaccgtattcaaacggatttaattcaagaagaggcaagaggaaatcatgcagaaattagtttactgttagtgcacgcacaagatcatttaatgaatgcaattacagtgaaagaactggctgaagaatttattgctcttcataaacgagtagaagagaaagtgaccgtataagatgtacattttattatgttgtgcagcaggtatgtcaacgagtatggtcgtaagaaaaatgcaagaagaggcaaagaaacaggggaagaattataaaattaaggcggttgattcagaacttgtgaaacttgaaataaaggaagcagatgtcgttttaatcggtccacaagtgaaatatttatttccagctgtagagtttcttgcaaattcatacaatataccagttgcgattatagaccaacgagattatggtatgtgtgatggtttgaaagtgcttaagcaagcagaacaattagttttagcataattatatctttttaaatataaacattataatgttataaagtttatttcattcttttatagtagagagaaagaggagggctattgatgaatgggtttatgagttttatggaacaaaagattatgccaacaacgcaaaagattgcaggacaacgacatttattagcaattcgaaacggggttatttctacattaccgttaacgatcgtcggatcatttttcgttatctttttaaatttaccaattgatgcatatatggaatggattgcaccgtttcgccatattttagatattccattccgatttacagtaggactaatggcattatacgcagcgtttggtgtaggggcttcgctcgcgaacttttatcagctcaatcagttaagtgcagggttattatctgtactcgcctttttactagcatcagttgaaccaattcaaattacgaaagctgtaccaggtgttattgatgcagggagatatatttcagtaggaacattaagtgcaacgtctttattcggcgcaattgttacagcattaattgcagtagaaatttatcattttatgattaagcataatatctcgattaaattaccagatagtgtaccaccagcagtttcaaattcgtttgcagcattaattccaacgttagcagttattcttttattctggggcattcgctacggtttgaaattcgatgtaaatacaacaattacatatttaatcgcaccattaaaatcagtattagtaggaaataatttattcggtggtttattaacagtattcttaatcgtgtttttctggtcattcggtatacatggaccagcgattttaggaccaattattcgtccgatgtgggattcagcaattcttgaaaatatggaagtgttcacggctacaggaaatgcacatcagttaccaaacttatttacagagcaattcattcaatggttcgtatggattggcggatcaggctcaacgttagctttagtaattatgtttatgttctctaaatctaagttcctaaaagagttaggtagattatcattcgtaccaggtttattcaatattaacgaaccaattattttcggtgcaccaattgtaatgaacccaatcttaattattccgttcgttattacaccgttagtgacaacgacagtatcatatttcgcagttgtttcaggtatgattccactcatgatggcgaaactgccatttacgatgttagcaccaattgcagcggtgattagtacggactggacaattatggctggtgtacttgtacttgttaactttgttatctcgttcgttatttactatccattcttcaaaatgtatgagaaacaacaattagcaggagaggagaaaacagaatgctcggagcaattatcatcttaattacattcgtggtcggacagtgtattgcccattattcgaaatgggtacaaagtaaatctttattagtgttactactagtatcagttttatttatcggttgttcaatgggtgcatatgtaatgttaggattgcaatcaccgtacgtaattattgtaccgacaattttatgtgcaacgtgtttatctgcaaaatatagatttacgagcatggcattaatacaacgtatgaaggagatgcaaaagcatggagcgtaaattaggaatttcactttacccagaacattcaacgaaagaaaaagatatggcttatatttccgcagcggcacgacacggtttttcaagaatatttacttgtttgttatctgtgaatcgtccgaaagaagaaattgtagctgaatttaaagagattatcaatcacgcaaaagataacaatatggaagttattttagatgtagctccggctgtgtttgatcagcttggtattagttatagcgatttatcattcttcgcggagttaggcgcagacggtattcgtttagatgtaggcttcgacgggttaactgaagcgaaaatgacgaataatccgtacggtttaaaaattgagttaaatgtaagtaacgatattgcgtacttagaaaatattctttcgcatcaagcgaataaatcagctttaattggttgccataatttttatccgcaaaaattcactggtcttccgtatgattatttcattcgctgtagtgaacgctttaaaaaacacggtattcgtacggcagcctttattacatcacatgctgcaaacatcggtccatgggatattaacgacggattatgtacgttagaagagcatcgtaatttaccaattgaagtacaagcgaagcatttatgggcaacagggctaatcgatgatgtcattatcggaaatgcttatgcgagtgaggaagagttagaaaaactaggaaacttaaatcgctacatgttacagctaaaagtgcactttgtaggcgaagtgactgaagtagaaaagagagccacgctgcaagaattacacgtaagacgcggcgacataacagagtatatgatacgttctacagaagtacgtaaaaagtacaaagattatgacttcccagtgcgtgaaagtgtgctgcaggaaagagggcaagttgtaattggaaacaattcatttggtaagtataaaggtgaactgcaaatcattctgaaagaaatgccgatagatgaacggaaaaatatcgtcggtacaattgcggaagaggagttattcttactagattatgtaggagcttggacgcagtttacttgtgtggaatagagaagagaaggagaggatgctgtggcatcctcttttttatgttgaaatagtagtctatcgtatatagaatgcaaagagatagatttgattttgacgggagcgaaggagatggaagagtatatagatggtttattaagggggatggctcatgaagatacagaggttaggcatcgtgcttatgatgaagcaaaagagctagatgacctattaacgtttccttatttacagcagaaggtaaccaaagcaaaaaaaatagcaatgaagaaagatatgtattatgtaatgacgaaacttgctattaatacgaaagagatcagtattgctgattatcttatagattgtttggaatgtgaacaaaacccgactttgttaagtgaactgcttagtaatatttatacattgccagaagtaagtgatacaaataaaattattccgtatatttaccataaaaacgatagtgttcgtttttgggcagtttcttccttaaagttatgtaaatcattagaagcggagagtgctttactaaagttgctggatactcaagaaaataaagatgagattacaaatatttgttataccttgcttgagattggaacaaatcaatcgattctgccgttaacaaagcttttatatagtaatagtgcctatgttcgttcaactgttattgaggtgttagcaaaaatagggggatcggacttacaaatagtttatattgaagctttacaggatagaaatgtgatggtgaaatatgaagctgttcgagctatttatacgtatggcgacgaaatggcaatgagaccaatttgcgaacgtgtgaataaaattgttgctagaagacgtaaaaatgaagtagagcctacggatgaagcagagattatcattgctcttcgtttcttacataagtttgctaatcatgaagaagttttaaagatatttgataaagtgtacaaaaaacgtggaaacttgtttatgtcggagaggaagtggcttcgagataacattacttactttcaagagaaagaaagaatgtaagaatcataaaaaagagccagcctcaaggatgagactgactcttttttactaactagtttaatactttaactgtaactgttttacgtccccagctacttgatgtacctttatctggcattaaaacgtcgattttattacctttaatagctccaccagtatcaccagcgattgctactccgtaaccttcaacccatacttttgaacctaatggaattacacttggatcaactgcaataagtttcatgtttggattagctgttaagttatgacctaaagctgattttacttggtcgcctgctttataaccattttcaagtggatctgctgtgtaagctgttgctacaacttggaactcacgagaagaagattgtgtgtttttctcagtttcttttgcaacaggttgttgtgtagctggtttttgaactttattagccgcttcacgatcagctgcctcttgagccttagctgctttacgagcttcagctgctgcctcttgagctttagctgcttcacgagcttcagcatctgcctgagctttagcttctgcttgagccttagctgcttcttgagctttagccgctgcttgagcttcagctgcttcctgagctttagctgcttcacgagctttagccgcttcttgagctttagtttctgcttgagcttcagcgtctgcctgagctttagcttctgcttgagccttagctgcttcacgagctttagctgcttcctgagctttaacttctgcttgagcttctgccgcttcacgagctttagttgcttcttgagctttagcttttgcttgagtttcagctacttcctgagctttaactgcttcacgaactttagctgtatcttgaacattagtcgttttttcaactttaactactggttgaactttaactggtgctttacctgttaagtaaggaacatgaacataagctgtttttccgttatattcaaattgaatccaatcattctgtacttggtgtgttgtttcaattacatcatcttttttcaacttaccaagaatctctgagtctgtgtttgctccagcacgtacgtttaatacgtttgctgttacgtagtaagtgtcttttgtatagtcagcgcttatgaaagcttctttaccgctattcaattgaacttttgaccaaccattttctgtatgtaaaacatttactttatatccatctaataattttcctacaacttttgattcagtagttgggttttctcgtacgtttagtacgtcagtcgttacgattgtttctgctttagcagatgttgtgaaaatcccaagaccaaaaaccgctgctgttgctatacccataaattttttcataatagcctccattgcatttgttttcgttgacctcattatagcaaccattattttcttatttgcgaaaaacataaaattacaaagctttcgtaacggggcattaatattctgtaacaattccataaatatcctgatagcgcttccttgttgttttttggcgtatcagggcatatgaaacacaaaatgagtagtatttcaattactgtaacgttaataatattacagtaatatttctaggtgatatctatagcgttacgaaagtagcatattttactgtttgaatggaaaattagttataaaacgataatctttttaggcgtgaaaatatataaatgaggtgaaatttaataaaatatcggtataattgttacaaaatcagtcgaagtatggaaaaaattacgccttgattttcgtctgttacatagtatttttgcaataatagaattagataatagccttagtacctataaataatgaagagtattaggatgatagttgtaacgtgaaacatatataatagaagaaactcaattcagtagataaataaaaaacgtaggagtgtaaactcctacgtttttgtttattcatatcgtaaacattcaattggatccagtttggcagctttgttagctggtagtaaaccgaatataataccgattaacatggagatacctactgcaagaagtccaagttcttttgagacaacgagtggccatccagcaaagattgagacgatccaagcgaagaaaataccgagcatgaatccgatgaaaccaccaagtcctgttaaaatacaagattcgattaagaattgtgttaatactttaccacgtgttgcaccaagtgctttacgaataccaatctcacgtgtacgttctgttacagatacgagcatgatgttcattacaccgataccaccaacaagtaaggagatagcagcaataccaccaaataccattttcatcataccgattgattcgtctagttgtttcgtaaattcacctaagtcttgtgcttcgaatttgtgctcaaatttaggagctttcatttcgtttaagacagaaacggcttgtttttctacacttttacgttctgtcggagaggtcattgttaatcttacagagtcatactcatttactcctgaaatgacaggcgcattttcaagtgatgtataaccttcaggcataggcattccaaagtcgtttttcgtttcgtatacaccaactattttatacggctttccttttatatctgtgtattgatttgattcccaaccactactaaataatttgttgaaagcttcttcatttaatataacagcagggattgcttggtttaattcactgtcatttaattcacgaccgtgaactaattttattttcgaatctgtcataaaggcgcctgttccaccttttaaatcaagatttacatcttttgaaccagcagatgcttttactttcatacttacgtctggatacacatctttaacgcctggtacagtttgcagacggtttagcatatcaggtgtgattttggcactatctgttccgtaatcaggattgttgtagtaaatcgttacttcgttatcttttccttggcctaattcttttttaaactttgcgtttgtaccatcacccattgaaatgatagtaataatggcactaataccgataataatacctaacatcgttaaaatagaacgcattttatgagcaaagatagaggaaagggccatgcgtatattttcactcgtattcaaaattaacctctccaatcttggacgatatttccgtcacgaattacaatttgacgtgctgcagcttccccgatttcacggtcatgggtaatcataatgattgttgagccttgtttatttaattcgtaaaagaggtccataatttgtgtgcttgttttcgtatcaagtgctcccgtcggttcatcggctaaaatgaattttgggttatttacgattgcacgtgcaacagcgacacgctgcttttgtccacctgataattcgttcggtaagtgagtagcgcgatcagctaaaccgacttttgttaaagcagctaatgagcgctcgcgtctttcttttttatcgactccagcgtaaataagaggtagttctacattttgaagcgctgtaagtctcggtaataacatgaagttttggaatacgaatccgatctctttattacgtacgtgtgcaagttctgtttcagtcatgtttgaaatattttgaccggctagttcgtacgtacctgtcgtcggtttatctaagcaaccgataatgttcattaatgttgatttaccagaaccagaaggtcccataatagaagtgaattctccttggttcagtgttacgtcaattccgtgtaatatttgaacggactctgcaccattttggaaggatttcgtgatgccttttaagttaatcactgggcgacaacctccataccatcttttaagtctttttcaggtttagagataatttcctctccttttttcactccagaaacttttgcttcgctatcagtctcgaattcaacagtaactgcttgttctttcgccttaccgtcttttacaacgaagacaacatttttgtcaccttttttcacgatactgcttttcggaacaattgtaccagttgcttcgccagatttacttgttacgtaaacgtggaagccgttttgtaattcgtcactattatctaatgtgacagtgaattgatagttagaaacagttttattttcatccatgctctttaatggtgtagaaccgatttctgttacttttcctgtccaagtcttaccagcgacagtttttgatgaaacagttacttcttgcccaactttcatactagcaagctcatattcagaaagttgaccttttaccttaaattgaccagcgtgacgaagagtaaccccgctcatacctgttttttcgtcagcagttttcacaatatcatcaattacgccatcagcaggacttgttacagaaagagtgtttactttctcttttgctgctttaatcatttcatcagctttttcaacttcaaactttttcatttcaagttgtgattctaattgcccaacttcagcttctgatgcttttaatgcttcagcgggaaggcctgcatttttatctttttgtaatttttgtttcgccgcatcaatttgtttttggaacaacgttacttctttttgtgcgattttcttttgcatttctgcttctgttacaccttgtttcgcagtcggatcattgtatttaaatagaagctgaccctttttcacttcatcgccttttttaacagctaattcatatgttccttttgttggatcaaatgaaatagtttcaattccatttggaataacttcgccaccaaatttttgcgcgttttggatttgtttttcagttactttatatccgctatatgccattgctacttctgaaccgccaccagcaaatgcaaagtatgatccagctgcaattccgattgctactacactagtaattaacaccttatttttctttttcatctatttatcaccttttcgttcgttttagtatctacattaagtatagaagaggtgaagaatctgacaaatcgttttagcttacaataaccttacagttttgtaaggtatgaatatgtaaatgtaaggtagaggttgtcctattgtaagcaaatgaattgactcgttgtttctttcttacaataatattgtatgaaggagaggaggaaggaagatggaagcttattttagtacgcatccattaaaaccgtttattccatactcaaggcaacatgccattatattatttattatgttggtggggatattttttctgtatcaataccaagatttattacgtcaaaatgagtggaatataacggttcgatatgcgattgcatttttatttataggtagtgaaattgggcttcatatgtgggagtggaaagcggggatttttgagctagctacttcattaccgtttgagttatgtacaattagtttgttgttagcgtcgattatgattgtaacgaaaagttaccgtatatatgagattgtattttttacgggaattattggtgcatcacaagccattttaacaccaaatttgcaatatgcttttccgcattttcgtttcattgaatattttatcgcgcatgtattgcttatttgggcaccactctttatgacttgggtggaaggctatagaccgaccttgcaatctattaagcgtacgatgatatttttaaacatattgattccgcttgtttcgtttgtgaattacaaaacaggtggtaattatatgtttttagctcataagccagaaacagcttcattactcgatatgttaggaccgcatccttactatattatttcattagaactcgcagcgcttattgggtgttttattttatatatgccgtttgcgaaaagagaaaggcatgcgcataaagaatcactaggatcatagcttagtgattttttgtctttaaaatatttacaattcagaaaattaagaataaaattagggggtaaattatagagagagaagggtgaaaatggtcaaaaaggtatttttgaatgggatggaagtgacgattcaatttcttatttcgattttggggattattattttaggggctctgccgaaattgttttatggatttaagctggatgtatcaaagtacatacagagtttaaaagaagtgtttgtgaacttaatggatatttccaatttgcaatatgtgagaggtaaatttttatttccgcagctgttcgtccattataaagaaacgattattatttttttagctgctttttttatttcattatttgtagcattttgtattgtttatgtaattatgagtagttcaccgcgtatacaacatcgaattaaatcatttctcatcttcctagaatccattccagatatccttcttattttagtatcacaaattttagttgtatggttttttaaacaaacaggttttttaccttttcaaattgcttcaattggaggcgagtcgattagagggttgccaatattgtgtttgagcatcccgactacgattatgtttgtaaaaatggtcgtgcttcgttttgaaaatgaactagaaaaagattatgtactatttgctaaggcgaaagggctggggcgttttcatattttaaatcgtcatattttacgaaatgtgttgcttagtacattattctttgcgaaaacgaatatcttttttatgttatctaatttatatattatagaatggatttttaatacgggtggtatttttatgtttttgaaatcgtatttcggtattagagttgaggttttcatcgttagtgtgcttcttatatatattccgatttttattttatttaaattgtttcattatctcattccggctgcgatgaaggagagattataatatgtggacgtatataaaacgtgataaaagattttggataagcattgggtttcttctcctattagttcttttgagcatcggaaatacgttatggaatgatggacatattagacaagttacattgcaatatgatgtggatgaaaatccacaagtgccaccgtttccaccttcattacaatttttactcgggacagaccggaaagggtatgacctgttacatttagtcattgaaggcgcgaagtggacgattggtatatctattttaattgcggcacttagaatggtaataggtgtgtttttcggtgtcgtactcggaacgtatataaaaagaggattttcaaaaattgaggctttctttgatagttttacagttattccaacagttatgattgcgtatttttttcttcaatctgcaaatgcatttggaagcggagaggagaccacaaccttttttgaaagggcttcgtttcaagtggtattacttgtactgcttgtaatgccagttattgcactgtatgttgcgaaggaagttcgtaaattgcgaacggaagaatttgttgatgccgcgcgcatattaggcggatcgagaagacgtattgttataaaacatctttttccgcatctctatatgacttttatactcgtatttcttcaacagtttacgcagagtcttactattttactgcacttaggattacttgaagtgttctttggtgggactgttacgtttggtggacctataaaagaggtggaatcttatacgcatgaatggtcaggtttaattggagtatactttagatcattaacagtgcatccatggattcctctagtcccaattacatttttcggactaactattttttcaggaaatatgattgtgaaaagtatagaagaggcaatgttgaaagtaaggttaggaggggagagaaagaggaaagatgtagaagaggaacaatctgctttgcagtcaaaagaagagttatttacttttaaacatacgatgtgaagagaaagaagaagcaagcatggatttcatgcttgcttcttttctttattttgtagaaacttcacctgcagcttctgtttgcggaataaagtatccaattataccaccgattattgctggaatgatccagccaattcctaagttataaaaaggaatggtgtgtacgatattagcgataaaatctggtatcatttccacattatcaagtgcatgaatacagctaataatgaatgctgcgatcatcgctccgatgtagacagaaggtttacgtttcgtatatttatcgataaatgatacgaaaattaaaatgattgtaattgggtacaaaataattaatacaggtagtgtgattttaattaataagcttaatcctaagtttgaaataacgaaactaaagatacaaacgtatagcacaagctttttgtatgaaatatttgttagcactgttgtgaagtaatttgcaaatgcacttacaacaccaattgccgttgttaaacaagcgaagataatggcgatacttaataaaacattaccgcttgtcccaaagaattgatacataacagtagctaatagttgaccaccgttttcgaattgccctaagtttccgtttgaagctccgatataaccgagtaagaaataaacaattgttaagaatagagcagcgatacttccgcaaatgattgtatattttgcgatagatttcttctcttgtataccgttttgacgaattgcatttacaacaattgttgatagtacgagagcgccaattgcatctaacgttaaaaatccttcaagaaatcctttgaaaaacgggatgtctttatagtcaccgataggttctgcaaacgttcctggtgaaagaatcgcttttgttgccataattgcaataattacaagtaaaattggcgttaatattttacctatatgatctactagcttggatggatttaatgataagaagtaaacgactgtaaagaaaatcgcactaaaaactaacatagaataccattgatctgggaaaagtggtgcaatcccaatttcataagatacagatccagttcgtggaataacaaatagtgggccgattgaaagataaataatgatagcgaatactgctgcgaattttggatgaacacggctcgctaaagtgttaaaactaccaccagcaagggcaacagcaacgatagcaagtaaagataaaccgacgtctgtaataataaaccctgtaatggaaacccacatattttctccggaagaaagaccgagaaggggcgggaaaatcatattaccagcaccgaagaaaactgcgaatagtaataaactaatcgaaagtatttgcgctggttttaaagttgtatgcatataaagaaaatcctcctaatgagtgtttttgtcgaaaattcaaataatttgtcgagtaactgttattattttaaaggtctgatgactagaaagcaatagggaattttgaaaatattaaaaaataatgcattaaatcgaataaatatactatttatatgtttaataggaaggatttaacttttaacgtaaaaaaacacatatcgctaggatacgtgtattaaaaatatatttttctatcgcgttcttcttttaaaatttcaaccgcttctcggaaacgttgtgaatgaacgatttcacgttcacgtaagaagcgtagactatcatttatatctggatcatcggataagttaatgagccattgatatgttgctcgtgctttttcttcagctgcaatatcctcgtatagatcggcaattggatcacctttagcctgtatataggttgcagtaaatggaacaccagcagcgttatggtaatgaagagcactgtcatgatcagcgtaatgagggtcaagaccagcagctttcatttgttcaggggtcgcatctttcgtcagcttataaaccatcgtagcaatcatttcaaggtgagcaaattcttctgtaccaatatcagtaagtaggccaatgactttatcaggaattgtataacgttgatttaagtaacgtagtgcagcagctaattctccatctgcaccaccgtattgctcgattaataattttgcaagtgcgggattgcaagttcccactttaactgggtattgtaatttcttttcataaatccacatagtttctctcctttatatttgccatggccaaggacctttgctccattcccaaggggcattagaatagctgtttccaaactgttggagtggtccgtatttttcttccatcttttgttttaatactctccgtttataggaaaagtcattaaattgattaatcgcagcggtgtcatctggatgtgtatctaaataaagagtgagttcaactagtacaaagtccagttcttgaagctccagtaaaagtttatagtattcttctggtagcgattgattcacgacagtagtcaccgcccttttttataaggattttcataatagtcataaaaaacaggccataaagtccctttttgtagtgcttcttttggtgtgaattgtggtaagtttggcggttgaaagcctaaaaataaattaggaggagtagaataatatttttttccaataggaggacagggatcgagaggactatgatagggcacgaatgatctcatatatttattcacgaataaacctccttaagtgttcattactacgtattgtattcagacataataggcatttatgacacatataaaaaagtaataggtacggggggaatgaatgtggagaatgtgaaacaattcattgtattggaagtgaaaaacttaaaggaaactttgtatttttacgaagggattttaggaattaaacctagtttagaaagacctcaattagatgtaacaggggtttggtatgatgctgactcaacgagaattagttttattatgaagcgcagtttgggcgggcgtgagaagagtgttacggactcagttgatgttctaacgttttcaatttctaacatagagaatgtaaagaagaggttagtattttataaaatcgcatacacagaaaacaaaagtgagaagagtattgtggtacaagacccggatggatataaacttcaagtgatagagaaggatgaatagacggaggggatttagtggagagaaattatgaagaaagtgcgttgtttgagcatcaattttggttaaaagtacttactgatcatgcacaatttttactggatgcattagctccgaaggaaaaagaggatataaaaaaagctacttactttgttgaaacatttacgaatttgttaaataaagttcggaatgtgaatctgatggcattttcaaaagaggcagaacaagccgctaaggagattcgggcgtttaaattaaatattatacagaagcagttggaagggaaaattacgattcattttacgccaacttttattaatcatatggtaaacgaagtggaagagtatatagcagttttagagtttttgaagaaaggggaagttccgcctgtttttcatgaattacattatcatctcgtttggttaacggatgcggctggtcacgcaggctctatttctggtggattagatcttgttgaaaaaagattaaaagagaaaagcgaagaatttacgaagcattttgaacaattttacttaaaggcagttgaaatgacagggtatttacgaacggagcttcatcattttccagcattaaagaagtttacgaaagatgtttcacttgaattgaaattattttcgcattttttacatgaagtggaagagctcgagttatcgaatgaagtattaagtgtattatcggctagaatggcagatcatatggcaagagaggaatgttactacttattaaaactagctcaatcgtctggacttgaaatgccgaaatgtaatccgctttaaagaaaaagaggtcaattttatttggcctctttttctgttttattgtctctttttatttttgcttgttcaatgcttgcctgtaatgtctccataatattaatgatgttcggagttggagagattgtttcagttttttcctgttgttcaattttattctcgattaattcggtaagggcttctttatattcatctgtatacatttcttgttcaaaaggatttgtaaggtggtggattaaattaattgctgcggtgagttcttgtttttgtataggataattttcgttacttggtaagttaggtgtatttgttatagcgcgaatttcattagggtagtggatggtttgtaacattagtccatcttcaaagttacggataatagctaaatgttgtttttttctaatagaaatatgaataagcccaagtttatttgtacgttcaagagcttcttttaataataaataggatttttcatgtcctggggtaggtcctataaaataagagcgatcataaagaacagaatcaatttcgttattttggacaaaagatataatacgaatggatcgtggttcatgagcttgttgtaattgagctaattctttttcatccataataatatatttatgaggtgcgtattcataggcttttacaatatcgttatcatcaatttcttcatccgtacaatcgggagcgaactttttatatttaataggtgttaagcattctttatggagacttaaaaattttatgtcgttttcttctacggcactgtatagtttaattcctatatttaatagtccaagtgaaagtgcgcctttccagacggtatgcaaatgaaacatctcccttcgttcaaaaatggttatgtatattatgagatagtaagaaatttcctatacgttttttgtttttacggaagggattggaatataaaatatattgacaagccctctgaaatattttaatgtgagtgtataaaattgtgtataaaggggagtaacttattacaataaagtcgtcattacagggagaaaccctcggctttattggcaacgtttcgttgttagtgagacctttaccagcaatggtaaaggcccctttctgtctttttgaggacccttaccatatttggtagggtccttttcgtatacaaagagaggagatataaaaatgaaaaaacttattagtagattaagagttgtatttcatgttcgccgatttgttccattcctatttgacttttttacttcaaaagaggtttcaataaagaagaaaattttatctgttgcttttttagttgggtatgtagcgatgccgctcgatttaattccagacttcctaccgtttatcggtattttagatgatattggagttgtgttatttattttgaaccgaattgtaaaaatggcgccagttcaattacaagaaaagcataacgtaaacgtaggataggagttaaaaatatggagcaaattattttagatataatcgagtttttaaagcagttttcttattttggagttgtgttagcattaacgtttgaatttattccggcagaagtagtgttgcctatggttgggtattgggtatacgagggagatatgaatttttggttggctgtattagcagggacacttggtggaacgacaggacctttaacgttatatgcactcggttattacggtggtcgtccgctattaataaaatacggaaaatacttctttattaaagaagaacaaattcaaaaagcagatgatttctttgagaaatatggaccagttgtagcatttgttggacgctttgtacctggagtgcgaacgcttatttctgttccatgtggtatggcaaaaatgaacatatggaaatttagtatttatacatttgtagcaatgttcccgttaacgactttgtatgtttattttggaatgaaattaggtccacattgggaaaaagcagcggatgttgttggacaatatatgctaccgatattaggaggcgttattcttattgttgctagtatctttgtctataaatatatgaaaaaaagaaacaaaacggaatctatctagtcatttgaatattttttgaaaatagatgaatagtacaggcaaaagactctgggggacatacacatatagggaatataaaagagagaggggaaacaactatgtcttgtgagtgctcagggtcagcattaacttgttgtccagataaaaattatgtgcaagataaagtgtgtagtccgtggtcaggaactgtagtggcgactgctattacgaatgtactgtacaacaataatattaatcaaaatatgattggaacagggtttgttcgatatgacgtcggaccggctccgatcacacttacagttttagatgcagcaggcgctacaattgatacacaaacattaaacccaggaacaagtatagcttttacgtaccgtcgtttcgtaacaattgaagtaactttacctgctgcaacagctggaacatatcaaggggagttttgtataactacacgttatccactttcataatagaaaaggagagggctaagatgtacaattctaacttatcatgctgttccagtaaaacacttgttcaagatcaggtatgtatagattgggctgctactggtgcggtaactgaaacagtgtatacgaataatattacgcaagatttatatgcatcaggttatgtgaaatatgatgtaggtacagctccaattacggtgaattttttagtaggagcgacagtggtgaatacaattactgtacaaccacaaagcagtggatcatttacagtaagatactttactacaattcaaattgtaacaacaggaacgggagtaagccaaggacaattatgtctgacagtacgttatccaatttcataagcaaaagcataccaagtggtatgcttttttatatagtttgtaagttaaggtggtgaagaaatttataagcaaaatgagaattgacaacaatattttccttccatatatcgggttgggttatttggaatatcaatgatagccacagattgtaaggattgacctgtatatgacattgtgttgccaggatagactgtaaaagtatttgtcacctttccgataatttgaacggtaattcctgcagtactactagtactattatacacagaaatggtaccagatattttaactacaccatctccttcccataagattaatgtaggattttcagaaggtggtggaatttcttttgttataagaaaattaccggcaaattcatttgtaattaattcacagcctggtggttctggtggattaggtggatcatagggagggcagatgatagataaaggggcataacagccgatattttttttacaagccattagtagctcctcccttcatactttctttttattactattaaatgttggaaaacgatagttgtgttaataaaggggcgaaaaatttcaggaaagtttgtttaataggcttccaaatcataataatgaataagagtctgttagacacaaggtacttgtataagataatacaagtaatgttggatgttacagaaaaatgactgtatatttacaaaagttaaataaatttcattttcactttaaacgaagttaatatgtgttcgatacaataaccattgtaattaattcattatatgaggaggatttacgtggacagaactgatttacgaaaagtaaaaggccttattggattattgatggtttttgtattagcattcgtatcatttccatggagcacatcagttaaagcagaagagaaaaagcaagaaaaggcatcaagtgagaagaagatagtttttccagttgtaagtgatgtgcatattaaaaatagtggaacggatgatacgtttcgctggaaaagagcgattgaacagtttaatacattagcaccaaagcaagatgcgtttgttattgtaggtgatttcacagatacaggatcagtgcagcaatatgatcgtttcatgcaagtgtataatgaaaatgcaaataaagatgcagtgcgaatgaattctctcggtaaccatgattattggaacggtttatccgtagagggtgcacagaagcgtttcttagaaaaaacaggtatggaatcaatttattatcataaagtggtaaaaggttatcacttccttgttatgtctccagagaatggaacaacacatggttattattcggacaagcaaattaattggttaaaagaagaaatggcaaaagcacaaaaagatgatccagaaaaaccgatttttgtatttttacatcaacatattaaagatacagtgtacggtagtcaggaatggggaacacaagatagcgcaaaaattaatgcagtgttaaaagaatatccacaagttattacgttttcaggtcattcacattatccgttagatgatccgagatcgatacatcaaaaagactttacatcagttggtacatcttcagtaagttatatggaagttgaaggtggtaaagtacaagggaatatcccgccaggagctagtacgttaagccaaggtttattagtagaagtagatgaagaagaagtgacgattaatcgccgtgatttccatacgaattcttggacaggcgagccttggaaaattaaattaccagcaaagaaagaaacatttacacatgtagaagatcgtgataaagaaaagccttactttgctaaagatgcaaagcttgctgtatcaaatgtaacagaaaatgcggcaacagtaacattcccgcaagcattggacaaccttcttgttcactcttaccgtgtgcaggctagagataagcaaacgggtgaaataaaaaataaattgttagcattctcagagttttatcgtgatccagtgccgaaagatcttacgtttacgcttgcagggttagatggcgggaaagcatatacacttgaagtagttgcgattgattcatttggcaatgaaaccgcacagccgttaactgcggaaattactacgaaaaaagataatattgacccgaatgtgaaagtaccaaaagctgatgttttcgatgtaaactttgcagatggtacatttaaagacaattcaccatttggtacaaaaggtgatgtgaagggcaatgtgactattgaatatgataaagcattgaagaagaatgttatgaagttaaacggaaaagcaaatacatttggataccttccattttcagcagcacaaaaagaaaaagtagcaaatacgtttacgttagaaactgtattttcaatgaatgaaattcgcggacaaggcatcttgcaaaatacagagagcggcggaattggatttgagtctacaggaagtggatatgttgaattatgggctcacattggaggtagctataaacgtgttggagttcaattagaagcgaacaaaacgtatcatttaacaggaacgtataacggaagcgaagtggctatttacgtagatggtaaaaaagtaaatagtcagccagctactgggaaagtgtatcatccgaacgtaccatttgcatttggagcggatcctgatagtaacggaaatggtggtattccgttaaatggacaaatcgcgcttgcgaaattatatagtaaagctttaagttcttcagaagtattagcatcatacaatgagttttctaaccgtacgaagttagagcaagtaaatgcgttatttgaagagcttggaaaagtaaaagaagtgttagttagtacgtatgaatttggtgataagccaggtcaatattcaaaggaagcatttcaagaattagagaaaagctataacattgcaaagcaagcatttgaaaatgtaggaagtactggggaacaaattattcaaacatataacgaattaaaatcagctaatgtaacatttgtacaatcaaaagtggcagaagaacaaccaaaaacaacgaaagaaaaattacaaatcaatattgaatctgcaaaagcagtagtgaagaaagcgcaagctgtaaatgtaacagatggttcagtgaaatcattgcaacaaaaaattacagttgcagaagctgtattacaagatgtgcaagtaaaagatgcacaggtagaaacgatgaatcgtacattagagtatgcgatttcacttgttgaaaaaagtatgaacaaataagagagaagaaaagaagcttatcatgataggcttcttttttgttatactaaaagtagcatagaaagagggagcgaataagttggaacagaaaaagctaaaaagaattcttgaatatgtatggatcgcggttgtgctccttgtaggatattatttattaaaagataaaagtatttgggttttattcttaatgacgtttttattagcaggattaggaacgttatttattaacttcttctttgatagtttgaatgcctggaagaagaaaaagaaggggacgaagtaaaggagggaatatatgcaaaagtggaagctcatatatcaggtgattattttcttagtgcttgtgggtattggaatgatcacatactcgacaccaataggaaattgggcatggtttacagcttgcatcggcatatttttcattttacaatcgttaacgaaaaaatatgatagtatagaaagatagctcgccattttatcggcgagctattttgttatgcctttttctgttcatcatttgttttttcaatagctaaatgactatgctttctagagtagaagaaatagaagcataagccgactataagccaaactgcaaagctaatccatgttgttttagacaaattaatcattaaatataagcagcaaagaatcgcgacaactggtagtacaggtacgaaaggtgtgcggaatccgcgttttaagtcagggtgtgtttttcgtaaaataagtactgcgcagcaaacgaatgtaaaggctgttaacgtgccgatgtttactaaattcgctagcaaatgtaagtctaaaaggcctgctaataaagcagcaacaacgccagtaatccacgtatttaataaagggatttttacttttttatttacacgtgctaacgcttttggaagtagaccgtcacggctcattgcatatgaaacgcgaacttgtccatacataacgactaagaggacggttgtcattccagtcatcgctccaacagcgagtagtcctgcaattgcatcttcaccaacgaagtgcaatgcaaatgcaactggatcagaaacgtctaattgtgtataaggaaccatacctgttaaaacgaaagatacaatcatatataaaatagtacaaataagaagagaaccgataataccaattggtaaatcacgctgtggttttttcgtttcttctgcagcggttgcgattgcatcaaaacctaaaaaggcgaaaaacacagtggcagccccagtaataataccgtcgtatccgaatggaatgaacggtgtccaattttcaggttttacatattttgcacctgctacgataaaggcgataataacggctaacttgataagaaccataatattattaatgcgtgcgctttcgcgtataccaaaacttaaaaggccagtaataagaagtaaaatacagacagcaggtaaatcgatgagaccaccttttcctacgccgggggccgaggcgattatggcgggcaggtgtatattgaaaccttgtagtaatgattgtaaataaccagaccaaccgacagctactgctgcaacggcaagtaaatattcgagcattaaacaccatccgacgatgaaggcgacgacttctccgactgtcatatatgcgtaagtatacacacttcctgagacaggaatagaagaagcaaattcagcataacaaaaggctacacaagcacaagtaaatgcagcaataaggaatgatagcataataccaggaccagaatgttttgctgcaacaatacctgttaatacaaagatccctgtcccaattacggcgccgattcctaaaaacgttaaatcgagtgcagttaatgttctatctagttgctttggtgactcagtactaagcgctttttttcgtaataatgacttcactttggactctctcccccgttttttcatttccataactgcgactatagtatgagcccattaaaaaagagtaagtaagtggaggtgcagttatggtatgtagttttttaaaattgctggattaatcttaatataattcagaatattttgtcaaataaaaatatgacaaataaaatgcggatcaataggggaaactacttgcagaaatggacgtgggttaacgacccactgattaaagttaaagtaggagcagatgctatgttattttattttgaacttgtcgtcattttactttgtacgaaattagctggtgacattagtgtgagacttggtcagccttctgtacttggtaagttaattgtcggtattattatcggtccggctgtactcggtattattaatagttctgaactgattgatgaattgagtgagattggtgttttgttacttatgtttatagcgggacttgaaacggatttagaagagttaaatcggaatttgaaatcgtcatttgcagtagcggctggtggaattatttttcctttcatcggtggttatgtaacaggattgctgtttggattaatacaatcccatgccatttttttaggtttattactttgcgcgacatcggttagtattacggtgcagacgctacgtgatttaggaaaaatgaatacgagagaaagtacaacaattttaggtgctgccgtatttgatgatgtcattgtcgttattttattagcatttgtaatgagttttttaggaacacaagatgtgaatataacacttgtcattgtaaagaaaattattttctttgtaagtattgtttttattgcatggaaagtcgttccttggattatgaaaatgcttgtcccgcttcgtgtaacagaagcgttaattagcgcggctcttattatttgcttctctttttcttattacagtgaaatgatgggaattgcaggtattattggagcgtttgcagcgggaattgctatttctcaaacagagtataagcatgaagtggaacataaaattgaaccgattgcttatgcaatatttgttccagtattcttcgtaagtatcggaatggaaattacatttcaaggtattggaagccagctttggttcattattattatgactctcattgcaattttcacaaagttaatcggatcaggtttaggagcgagactgacaggatttaatctccaatcttctattagtattggcgcggggatggtatcacgtggtgaagtagcgcttatcatcgcagcaaatggacttacggcgaatttattagcgaaagaaaatttcacagcgattgttattgttgttatattgacgacgattattacaccaccacttttgaagaaatattttgcatagagaggaagggcttatctgatgtaggtaagctctttttttattcctaaaagcaacgatcatatagcatgaagcgtttgtaattatggtaaaatctatgtatgtgatatgacaaggagagggaagtgtgaagattacgaaggagaaggttattggtgtaatcgtacttattgcagtatgtataccatttactgcatggaaagaatcaaaagtgaaagattttccggtttctattttttcggaagaagcagatggtgagtacggtcagaagctgaaatatactgcttttttacctgatgttgcgatttggatgaacggttgggaaaagaagtggacagaaggggaaagaactgtttatcaaaaagggaatcgcattgtaaatgtgtttcatcctcctggcgatgatggttattaccttcttgaagcaagagaaaataagtgaacgcaaccgtaagaagtggaggttaaatagtgaaagcttcaacattactatttaaaattgaaagtaatatggatcaattttcaccagctgagaagaaggttgccatgtacataatggagaatgcagagattgtaccgaatttaacgacgaaagaagtgtcaacgaatgcaggcgcaagtgaagcgagtgtcgttcgcttttgtaaatcgattggaatcggaagttttaaagcatttaagatagcactcgttcgtgaattaactattgctgattataatattaacgatttttcagtgatgaatacagaagatggaccgtatgatttatttaataaagttacttatgtgaataaagctgcaattgaggcgagtgttactgcaatagataagagagaacttgagaaagctgcagatcgtattgtaaatgccgataaaattatcttttatggagtaggcggatcagctacgccagcaatggacggggcttataaatttacgcggcttggatttacagcgatgatgctatctgattttcatatgatgttgccacttgtgacgaatttaaaagaaggcgatatatttgttgcgatttcaacatctggtcgaacgaaagatgtgcttgaaatggcgcagtatgcaaagagacaaggtgcaactgttattggaattacgaaactagatcaatcatcccccctatataaagaagcggatattcgcctttgtatgccagatgtagaacaagatcatcgtattgcgagtattgcttcgagaatgacgcaactgaatatgattgatgctttatatgtgattactttcaatcggattggtaataaagtattggatcaatttatggagacgcgagaagaagcgttgcggttacggaagttaaagtagaagaaaagatgaggagactcatctttttttatccccctatttgccgggcagtaagaccctcacttcaaaattcagcggaagcaaagaaagttaggtggggatcaactgcccgtaaatgcccgattggtgcgggctaataatcagtggggatgaacaaaacccacactgattaaagtttcactttatgatctttgacaaaaatatgtcatgtcgtgaaattttatttcataaaataagaaagagtaattgatttttagtttcttaaagttataataaaagtgtgaaatataatttcaaagagggtggcaatatgttagaaaatttatcgacagaacatcgtaatgagaaaacaatgaatttggatgagatgagcataaaaggagtgttgcaaagtatgaatgaagaagatcgaactgttgcgttagcagttgaaaaagagatagaacaaattgaaaaggttgtacagactgttattaaatcttttgaagaagagggacgtttaatttacattggtgctggtacgagtggtcgtttaggtattctagatgcagtggaatgtccgccgacatttggcacggatgataaaatggtgcaaggatttatagcaggtggattgaaagcgtttactaaagcggtggaaggtgccgaagatcgcgaagagttagcagaagaagatttaaaaagtattggattaaatgagaaagatacagtgattggaattgctgcaagtggcagaactccttacgtaattggcggcttgaaatacgcacagagtgtaggagcgagtacagcgagtatttcttgtaataaaaatgctgaaataagtaaatatgcaaagttaaatgtggaagtagagacaggtgcagaaatattaacaggatcaacgcgtttaaaagctggtacagcacaaaaattagtgttgaatatgatttcaacagcttcgatgattggtgtaggaaaagtatataaaaacttaatggtagatgttcaatccacaaatgaaaagttagtagaacgatcaaaacgaattattgtggaagcaacaggcgctagttatgaagtagcggcagagtattatgaaaaggcagaacgtaacgtaaaagctgccattgttatggtgttgttgcagtgcgaatatggggaagcactggagaaactaaaatgcgcaaaagggtttgtgaagaaagcactataaaataatagggagggggattctattatgaagaaagaagagagaatggccaaggaaatttcggagcaacttggaggaataaaaaatattcgtagtattgctcattgtatgacgagactacgattaacgcttcatgatgaaagtaaagtaaatatggaccttttaaaaaaagttgaaggcgttatgggtgttatagaagatgagacgcttcaagttgtcgttggtccaggaacagtaaataaagtagcagctgaaatggaaggcttgacaggactacgaattggtgagatagcagatcatcaccttgaagatattgggcaagagatgaaatcagagattaagaagaaaaataatacaccggtgaaaaactttttacgaaaaataggaagtattttcattccgttaattccaggacttgttgcgtcaggaattataaacggggttgctaactttgcgaaaaacgctggtgctgatccaaatgcaacgtggttacaaatgttactactcattggcggcggtatctttacattcttaggaattttagttggttggaatacagcgaaagagttcggcgggacaccggttcttggggcaattgctggcattttaattttcaacccggcgatggcaaacgtaaaattgtttggtgaagcattagtgcccggacggggcggattattcgcagttatttttgcagcatggcttatggttgtagtggaaagacaagttcgaaaagcagtgccgaatgcagttgatattatcgtgacaccactcattactgtattagttgtaagtattgtaacaatgttagccattcagccattagcaggtttcttatcagatggtattacgagcggaattaatgcgattttaaatattggcggagcatttgctggcgcagtacttgcgggaacatttttacctcttgttatggtcggattgcatcacggtttaacaccaattcatatggaatttattaatcaaacacacgtaacacctttattaccagtactagcaatggctggtgctggccaagtgggcgcagcaattgcgatttatgtgaaaacaaaaaacaaacgacttcgaaatgtaattaaaggtggattgccagttggctttttaggaattggtgagccgctattatacggggttacattaccacttgggaaaccgtttattactgcttgtttaggagcggctgtcggtggtgcattccaagcagttatgcaaacagcttctcttggaattggcgtatcagggctatctttaattccgttaattgctgacaataaatatttactatatttcttaggtttagtaattgcatatgctttcggatttatctttacgtacttcttcggatttaaagaagaaatggcagaaaacatatagagaaagggattcctttctctttttctattaatagagagggagatttatatgatcggagtttccatttatctttcaaaagaacgagtagagaaacaaaaagagtggctaaaagtagcgaaggaacatgggtttacatctatttttacatcactgcacattccagaagatgatccaaatacgtataaagagttaattcaaatattagggaaacaagcttttgcacatgaaatggagctaatggttgatgtttctccaaaatcgttacaccatttagggctaacatatgaaaatgtggaagagctattggactggggtattaccggtttaagaatggattacggcattgcgccaaaagaaattgcaagcgtatctcataagatgaaagtagctttaaatgcgagtacgattacaaagtcattttggaaagaattacttacagaacatataagagtagagaatgtagaagcatggcataatttttacccgcgcccagagacaggactagcaaagtccttcttacaaaaacaaaatcaatatttacagaagtgcggaataaagacaatggcatttattccaggagatgcggaaaaacgtggtccgttatatgaagggttaccaacgttagaaaaacatcgcaatatgcgcccgcttgaagcgtacttagaacttgtacaagattgtggtgttgataaagtattgattggagatataagcgcaagtttagaaagtatgcaagaagtagctagtgcaagtagagggattattccattgcgttacaaatcatttataactgataaagaagtattaaaagtggtagagcaagtgcatacaaatagactagatccgtctcgtgatgttattcgatctgtagaatcaagggaaggaaatagagtggtgataaagccgatgcatacaattgtaagaaagaaagggagcattacaattgataatgaattgtacggtagatatgcaggggagatgcaagttgccacatatgatttacctgtagatgagaaagtgaatgttgttggaatggttgtggaagaggacgtttctttgctgccttatattggcgctggaaaaatgtttcaactttttctatgcgatagaataaaagcttgaattagcgctattttgtaagaaaacattatccgtaaaacggataatgttttttgttttatttaaaaaagtatttgacgaatgaaataaaataccgtattgttttgacttgtaaataaaagttcaccataacaaaacaaaaaggagagttcaaaatgaatcaatatattgggaatttaattattcgtatcgtgttaggagttacgttctttgcacatggtttagcaaagtttcaatcaggtatcgataatgtagcagggtggtttacaagcatcggtttaccaggtggccttgcatacggcgtagcaacagttgaattagttggtggtatattattaattatcggtttaggtgtacgatatgtaggattgttattcgctcttattttagctggagctatcgtaaaggtaaatggagcagcaggtttattaggagatggaaagaatccaggatatgaattagatcttgcattattatcaatgggtgcgtatttattcgtagtaaaagcagaaggatatgtagatcgtttcttaaaagagaaagtaatgaaaacgaagtaaattttatttataaatgttgacttgaagaatcattgtaactataatgattacagctaatagattaagagtaaaacaatttaaatgtttttttacacaagatgtaactgtgatggttacgtctcgtgtaaaaataaataaacgggaggaagtaatatgcctaaatcaaatttagaaattattaaaagcacgtatgaaggatcagcttcttcgaatgcaaagcatttagcagaagccctctctgaaaaagtggaatggacagaggcagaaggttttccgtacggcggaacatataaaggcgtagaagctataatggaaaatgtatttagccgtttaggatcagaatgggatgattataaagcaagtgtaaatacatatcatgaagtaaacggaaaagatgtaattattgctgaaggtatgtattctggagtttataaagaaacaggaaaatcatttgaagcagaatttgttcatgtatggcaacttgagaacggaaaaatcgtgaagtttaagcaatatgtagatagtcatattgttagggaagcgatgaagagataatgctttttaaatggatcgtaggtatatgcattacaattatagtaattttctcgtctatagttggcggaaagaaattgcttgcatatgtggaaaaagaaaataaaaatattcaaaccgagcgagcggcaaacgaaaaagagaaaaaagctgcagaagaagctccgcaaattagtgaaggtgaaattatttctactatgcataaaatggtgcaccaaaaggtaaaatcctctgaaaaatggggatttgtagagatgacaaaaaaggaaatttctaatgtaaaaagagatattgaaaatagtacaggttttcaatataaaatgaagttattttctattataaataggtgggaaaaaggagatttttctcaaactgttgaggagcataactttttatggagccttcaaggtggagatactggcaaggcgacggaacgtttatcgccaaaagaggaaaagcagtatataagagaaatgaagagtaaataaaaacatcgccaacctagatgacgatgttttttcattaagaatgttttcgtattaaaggtctagttggctgaacggcaacagttttgaaatgagaaaataaataacatcctgttacaacgacaattgtccctaaaatttgtatccacgttaattcttctccgagaaatatgaatgctaaaatggctgtgaaaattggattgaagtttagaaaaatacctgatgtagttgcgcctaatttttgtacgccaatattccaaaataccatacaaagaactgtcgaaataagcccagtatataaaagtgatgtgatgaaagaagtatttatatttgaaacagtgaagctacctatgttaaacggtagtaataaaataacgccgaaaataccagagtacaacgttgccataagtggtgtagttgtttttgttgcccatttactacaaacagaatagattccccaaatacaaaccgctgcaatcatccataaatcaccgctattaaaatgtagtgaaaataaaagcgagaaatcaccttttaataggacgaggatgaccccgaagaatgaaagaatcatggataggatttgaagtgtatttactttttcttttagaaataatactgaaaataatgcgattgaaattgcattcaatgtagaaataagacctacattcgtagcggatgttttttctaatgctaaaaattgaaagatgttaaaaagagcgactcctgaaattcccattaatattaacggaagtatcgcggtacgtggtggaaggattttcttttctttaaaccataccattggtaataaacaaacaatcgcaatcagccaccttaaacttgtcagtgtcatcggtgatgcatgatcgacgagtgattttccaacgacgaaatttcctccccataataagctcgttagtaatagtaaaaagacgtaaaaataaggcatgataaaatccccttttttgtaatcaatacttattgtaaataattttagcatttttctttattgtgtaatatattcttttgtataatggtgaaaactcgataaaatatttagtttaaaatgatatttacagaaaaatattcagttttatataaattataagttgttttctcgaataatcatcggtaagaaaaaaggaggaattgtaatggagtcgtctgttattaaagtgttggatgatttggatgtacgaattttagatatattgcagaaggattcacaagtaagtaatgcagagctggcacgtcgcgttaatttatcaccggctgcgatgcatgcaagaataaaaaggttagatggggaaggtttcatcgataagcaagttgcgattttaaatcaagaaaagcttgggtttgatttattatgctttatttttatgagtacgaatattcatcaatttgacaagttagaagtgttggagaaagaattagaatcgatgccggaagtgttagaatgtcactgtttaacaggagagtacgattatttattaaaggttgcaaatcgtgatcgtaaagaactagagcagtttattagaaagctgaataagcttggtattacacgtatacagacgagtttggcacttcgtgaaattaaatattcaacagtattaccgatacgagatgaggaaccgagcatcgattagattgcttggttttttgtttgtataaagtgattgacgaggagaaaagagagctgtattattatataaaattatgaattaaaattcatttaaagttataaatattaatattgaggggcaaggggatgtaatatgaaaatctgtaatgcggtgaccagtgatgtgaaagaaatttatagtcttattgaggtttatgcaaaagagggagttgttttaccacgttctcttttgtctctttatcaatatttgcaatgtttatatgttatgaaagaagacgagagaattgttggagttgctggattgcatgtgttaggagaagatcttgcagaaatacgatcgttagtagtttcgcatacatatgcagggaaagggataggacgtatgctcgtaaatcatgtaatggaggaagctacgaaaataaatgtaagaagagtaatttccttaacatatgaaacagtattttttcaaaagtgtggatttgattttataaataaagaagcgttgccagagaaagtatggattgattgtagacattgtccaaagatggattattgtgatgaagtggcgatggttcggtatgttggataaaaaaatttatagagaaaaagttcccactattatttacagatatagtgggaacatgtatttccataagaaatggacaggttattaagaatttgaattcgtttgtcttacggcaaaattataaagtggatctttaagttcatagttatacgttaaaccgtcgacaattcctacaactttatcattatcataaaggtcgagcataaattttgccatttgttttgcagtgtggaatttcggtacaacattatcgtattcgaactcatcaataccaaatgaacgttttgcaaattctgtttcagttgccccaggtgctaaaacctttgcttgcagttttgcgccttgttctttcagttcgtgagacagcccttctgtaaaggcacttacataaaattttgtagcgcaatacgtaacagcatcagcaacaatcgtgtatccgccgcccgatgaaacgttaataagctgtgttccgtcaaccattgaataatctcgaacgaaaagagaagagagtattgttagtgcttctatattgacatgcaacatcgtctcgattttatttaaattttgttcggcaattgaggcgaaattaccaaaacctgcgttattaatccacgtttcaatttgaaaagcttgtaggctttcataaagtttataaacatcttcagtaacagataaatcagttcgtcgaatgacaacatctaactctggatgcatttcgttaattttcaattttaatccatctaattcttcttgtcttcgagctacaagtactaaatttttcccgcgagatgcaaatgctaaagctgcttcataaccaattccggaacttgcaccagtaataacagtgtatttcatataaaatccccctaaattcaaatttatttatggttagattgtatttgttagagtatactctaagtcaaatgttttttataaatttgatacgttcataaaatatataaggataagcatgtggagggagtttagtatgtatacaattagtgaggtagcaaaattattaggattgagcacacatacactacgttattatgaaaaggaaaatatattgattgcaaatcgtgatacaaatggaaatcgactttacgaagagtcacatataaagtggttgcagtttgtaatgaaattaaaacaaacgcaaatgccaatagcaaaaataagagaatacgctagattatatacagaaggggagcatacaacagaagctcgtttacagctcctagaagatcataggaaatctattcagattcaaagagaaaacttagaggttacagagaagatgcttgagaataaaattcgtacatacaaaagctcattggaaaataaatagatgttgttatgtgatgaaaaatggatttgatctatgagtatttcatcatagtgtgcggataaataaaaaagagcagctagcaaaagctaactgctccattcaagggatctctccaagggggagtggagaaaatattatgttactagcattattgacagattattaggaaatatacaaatcggatgaaagaaattttaaataaaatttcggtattgacagtttttaaaatgttcatgtacaatacatatgaatgacattcagtcattttttatggcaggatgcagttagcttagaaatggaacaaatacaatgataaatgaggatgatagttatttttatatagtattgatgaaagagtatatttttttaaaacaaaatgactgatagtcagtcataagaggtgagaggtatgaaaaatagagcttggttatatgtcatattaacatgtatctttgaaattttttgggtgtttggttttaatacggctaatacttggtggcattggattattattttaggagttatcgctgttgattttcacttcctttctaaagcgtgtgaacatcttgcaacaggaactgtatatgctattttcgctggagctggtacggtaggtactttcttaatggatgtatttcttttcggtggaagtttcagcgcaggcaaactattcttcattcttatggtagtagccggcgttatcggtttaaagttagctgacaataaagaagaaactgtggaaggagctgcttaaaaaatgggttggtttttcgtatgttgtgctgcaattagtgaaatagtcggtgtgataggacttaaaatgtatagtaaagataagacattagccaatggtgcgatttatataggtgggtttgctacatccttcgcatttttgtatacttccttcttatttttacaagtaagtgtcgcctatgcggtttggattggtatcggaacagcaggtgcagttttgttaaacatgttcttgtttggtgagtcgaaaagtaaagcgcgtatcattagtgtgtttcttattgtatgtggagtgacaggattaaaggcactttcttaaagatatattgtatttttatctcctaattgtttattaggagattttattataaaaaaatgatttcctcttagagttcactatcattgacagtacaatcgattatcttataaaatgagtgacagtcattcaatatgcgtgtgaaagggtttagatgatgaataaaaaagagaaaattgtctatgcagctattgaagtgtttcaggaaaagggcgtcgaaaaaacgaagatttctgatatcgtgaaattagctggcattgcgcaaggaactttctatttatattttccttctaagttatctgttatgcctgcaatagcagaagtgatggttgaaaagatgatacttgcagtgaaagaaaaagtgcaaaacgatgcgcctttctcaagtaaagtaacgcaagtaatagatgcggtgtttcactttatagctgaatatcgtgaaatacaggctttaatgtatgctggtcttgcatctacagaacatataaaagaatgggaagctgtgtatgagcccctttatatgtggctaagtgaatttttaaatgaggcaaaagaagctggtgaaattcgtgattcagttcacgcagagcgaacagcgaagttatttatcgctctagttgaatcagcagcggaacaagtgtatttatatgatcataaagatgatgagcaagtcgatttgcaaaaggcagaagtactagattttttaacacatgcactacatataaagaaatagtgagatgaacctgtctgaaaaggtaggttcatttttgaggaaaactgaatgatagtcattcatctaatgcgtatgtatgtgtggaaggatagtgtgaaattctaacgagtaggggggcatctctactcatgaatagcccacaaatagaaggataaagaaaaagcttcttgggcattattttttgagaggaacttacgggaagaggtgttaaaaagtgaagaaaccgataaaagaacaaaagatggtattggtcattcttttgagtaatatatttatcgcttttttagggattggattaatcattccggttatgccgtcctttatgaatgatatgcatttaacagggaagacgatgggatatctcgttgcagtgtttgcaatggcacagctcattacttcacctattacaggccggtgggttgatctttacggtagaaagaaaatgataatcattggattatttatttttggtgtttcagagcttctttttggattaggaaaagatgtatggatgctttatgtagcaagggtattaggcggaattagtgctgcgtttattatgcctggtgttacggcatatgttgcggatattacatctattcaggaacgtccaaaggcgatgggatacttatctgcggctattagtactggattcattatagggcctggaatcggcggatttattgcagaatacggtatacgtgtgccgtttttcgttgcagcagtaattgcttttatagcatgtgtgatttcgatctttattttaaaagaaccgttaacgaaagaagaacttgcagagatttcttctaatacgaaggaatcaagttttattggtgatttaaagaaatcattacatccaatgtatgcaattgcatttattatcgtatttgtactcgcattcggattatcagcgtatgaaacagtgtttagcttgttctctgatcataaatttggcttctcgccgaaagatatcgcagcaattattacaattagttcaatctttggggtagttgtgcaagtatttatgtttggcaaattggtagaaatgttcggtgagaaagtgttaattcaaatatgtttaattgtaggtgcagtattagcattcgtctcaactgtagtctttaattattggattgtacttctcgttacttgcttcattttcttagcatttgatttacttcgtccagctttaacgacatttttatcaaaagcagccggaaaagagcaaggattcgtcgctggtatgaactcgacttatacgagtttaggaaatatcgcaggaccagcgatgggcggaatattatttgatatgaatattcattatccatatgcattttcaggcgttgttttaatagttggtctcggcattacatttatgtggagagagaaacagttggctgaaagttttgcgaagtaataaaaccccttacgacggtaaggggtttttgttttattctgattaaagtttcattttataaacttaacccaaaccgttttaattcaataaaaatcccctctaattgctttcctttatccgttaatgtgtactctacacgaggcggaacttctggatatacttttctcgttataatgccttgagactctaattcttttagtcgaagcgataatgtttttggactaataccatccattgatttttgtaaatcactaaagcgtaatgttccttcgataagaagatcacgaatgattaaaaacgtccattttgtactaattacatcaagcgttttagcgataggacaaggtatgcccggtaaacctttcgttaattcaactggatttatatcgttcatggaactagcctccataaaatttttttggatgaatttgctttatagtatcacaaaactatacttttggtaactatatgaaaaaaatatcactacttccataaaggaagttagtgcatatacaatagcaatacgaaacaaaaaggatttatataaggaggtggtgatttccatggggataaaaaagttatttggatttcttagtttgtttgttatttgtattgtgcttgtagcatgtggtgtggaacaaaaaactgaagttcagttattaaaagaaatgccaaagccaaaagcaatgacaattgatccctcactaagtaaaaaagaagcgacagaaatggttcatgcggcgcagcgtttttatgcattttgggatacaggtaaggaggaacttattccgcagactgttactaaagatttcttcgataatacattgccgaaagggcgaacacaaggcattgaaggattaaagtttgcagcgcaaaattttcgtaaagttgtgcctgatatacattgtgagattgaagacttattagttgttggtgataaagtaacagcccgtctttcttttacaggaacgcataatggtaagaaaattaatttttttgcaattgatattttacatgtgaaagacggaaagataacagaagattggcatttagaagataatcttacactacagcagcaactcggcttaatagctgaagagtagatcatataggggagagaaaaacgatgaaaaatatatttattataaatggacatgaaaaatacggtacaaaggaaggacgattaaataaaacgttagtagattatatggttactgtattagacgagaatcatcatgtgaaaacaacaacgattcaagatggttacaatattaaagaagaacaagataagtttttatgggctgatgttgtgatttatcaaacaccaatttactggtttagtgttccaggcttatttaaaacgtatatggatgaagtatatgaatacggtttgttctttaaaggtgcagatgaatatggaacaggtggtttattaaaagagaaagagtatatgttctctacaacttggaatgcacctgaaaaagcatttggagataagacaaagttctttgaaggagaaagtttagaatcagcgcttagtcatttacatcgcgtgcaaaagtttctcggtatgagtccgttaaagagttttgcttgttatgatgtggtgaagaatccggatatagagaagtttttagtgaacttgaaagatcacttagatggagtaattaaataatagtatgtgaagaaggtactgttaaggatgtagtaccttctccttttataatgactcacattttaagacatggatggctgtatccataacttcgcaaaatttgcccaaccgaatgaatcaattgttacgttttttaaagaagaggggtatgtttttctttttagaacgtgatagttaaataaaatgatgtgttctgcttgtaaaaactcttcaatctcatacatgagttcatagcgcttttctttattttcttctagtaaaaatgtatctagtaaacagttaatttgtttttcgtagtgcgggtccatgaaccgatttacgaagcaacttttatttttaaatacatttaagaatgcaatttcatgattggcagcaaatacttctcccatgaaaataatatcagcatgtttatcaatagagcgattcatataatctgaaacgggaaatgggtgaagctctacttgtatacctaaactttcacatcgttcttttaagaaatatgcgtcatttgcactatctttaaatgcgaagaagtaaatatgtatcgtttctccattatatgtactctttttcaaatactcttttgccttttctaaagagtaggatcttcttgttgcaaggcggcttctatcagggaaaaagcttgatgcagcaattgtccgtctaccctctatgttacgaagtatcatttcaacatcatatagttctctccaagcttttcgaaagtaaatgtcgtgatgaggaccaggttttttaaagttgaagctagcataaatacaacctatttcttctatttgtatatcatgcctttcattttcctcttcgtttggtagttcataatcagcatctatttgcacatggtcaggaataccccaaaattcaatacggtctaataacgcgcgctctttaaaataatgggtgaacgcttcgagtatgatattatcttcagagtaatgagcaagtttgaaaggtccagtacctatataatgatgattttgaatactcgtatcacgcggtaaaattgcgagctgcattgaacttacatagtgtaagaaaaataaatttggtttcgctaaatggaatcgaatttgtagtggtgatggcgtttcaatttgaacgatttcttctgttaaccattcgaaaggagagtaaacttcttttagtctttcaaatgaaaattgtacatctttagaagttaaaactgtttcgttatgaaaatatacatcctttcgtaaataaaaagtccacgtaagcccgtcttcacttaattcccacgtatgcgcaatgtgaggctccattttttcagtaacatcgttatagacgactaatgtatcaaaaatttgactcgtaagatggctctctgtagttacagccacaaaagccggatctaatgggaatatctttctcgatataggaatctttaatacgtcgtacatatcatttgaaggttcgtatccaaaatgatgatgtagtttattttctatctttttttgaagtgcgagggggaggggttcttttaaaagaagaaagatatcttttaatttttcttgcgctaacagttcatctgtataggactcaatcgcttctacgaaattatgtataaatagaatttccgttttatttccgcggcctcgccctggagtccagctaattaattgctcctcgctcattttctttaataaaatctttacgtttttcgtactgcaatataaaacatccgctaattcttgtaagctatttcgcatatgttgttgatcttgtgcatgtagtcttagtctaatgtaatagtccataattttcatatatacacttccttctatcataaaaggggaaactctttagaatattctaacctttttcttcctttttttcaaagtaaaataagtaagcataaggaggggaaacaatgggattttggagtatgcatcgaaatataaaaattagaattataacatcgtttttaacacgtactgtgtccacgatgatttttccatttatggcgatttatttttccataaagttaggtagtgcgattgctggtgcgttactacttattaatgtcatagcttcattagtaattggtttatacggtggatatgttggagaccggcttgggcgtaaaaaggttatgattatcggtcaaagtatacaagtcatttccattgcttgtatgggagttgcgaattcggattacgttgactcaccgtggttaacatttatctttatgctagtgaatagtttagggtctggacttatgaatcctgcgacagaggcgatgttaattgatgtgagtacacctgaaaatcgaaaagtgatgtacagcattaattactgggctattaacttatccattgcaattggagcgatatttggtggattactatttgaaaactatagattacaattgtttatcgtattaactcttgttgcgattattactctatatgtaatggcagtatatatggaagaggtgtatgtggctagaaaaacagtagagaagaaaaatgtattaaaagatatggcggatagttataaagttgtaatgaaagatagagcttttttaattttttgtgcagcaagtatatgtacattgtctttagagtttcaaattaataattatttaggtgttcgcttgcagaaggaatttgaaacggtgcactttttattcgggaatggttttacgtttgatttaacagggattcgcatgttgagctggatttctgcagagaatacaattttagttgtgttatgttcagcacttcttattaaaatgctgaaaagcttcaacgatttgaaaatcttatatgtaggcttatttatttacacgattggatttgcaatactcggaacgagcaatagcttatggattttattaattgcagggcttttccaaacggtaggcgagatgatgtatgtgccagtgcgtcaatctattatggcagatatggtgccaaatgaggcgagaggttcatatatggcgattaacggaatggtctttcaagttgcaaaaatgaacggggcattaggtgttatgctaggttcatttattgcatcttggggcatgagtgctctgtactttatcgttggtatgagcagtattttactatttatgaaggcgatagggagagagaagtatgagggggaggtttctcagattggataaaacgatatgaaaagcgatgctagaaatcgcttttcatatggcttttaaaacggatcaacttcagctaaatcaggattgctatttgggtttgttaataagactttcagctcacctacttcagagagcgcaacgaggatataaccactaataaggacgacgagtccgatgacccttaatgtttgcagtgtaatatcacggctattgttttcggagttgtcttggggcgttgaaggtggattgttattcataaatagggctcccatcttttgtatttatatatgtgcgaaatcattatttaacttatggataggaattatatagtcattttcactatatgagaaatgcctatgaaaagtgataaggaatttttgggcgagaaaaggggggaatccaaaagattattaaaactgaacttttggattcccctctttttatttatcttgctatttgtggtggtcggatttcctgtaaacgaccagttgatgagggctaatgaatcagtgggggatgaataaaaccccactgattcattattttcatgtaaatacaaggttagttaaccaaattagttatcctaatatacgcaacgattcttcaataaacgctgggatgtcctctggctgtctacttgttactagctgattttgacatacgacaacctctttgtcatgaaagttcccgccggcatttttcaaatcgacttcaatagatttatatccagttacatcgcgtccttcaagtgtttgtgcagtaatgagtagctgaggtccgtgacaaatagcaaaaacaggtttttccgcatccataaatgctttactaaagcgaacaaaacgttcatcggcacgaagtatatctggagaaaatccacccggtatgaagagggcatcaaagttctctggagaaacatcatcaatacttttatcaatcacgacttcactttttccttgcttaccgtgtaccgttttccctttttccatttcaatagttgtgaattcatatcccttttgtttaaaagcttctactggctctgtgtattctgtatcctcgaaataatccgttattaaaatagcaatttttttactcattctaatccgctccttatattatattatcggctccagaatcttccttgggcaatgccttctataaatgattcaattgaagtatttgttaagttgtaaactcctgctccatccagtttaatcttactatggtccaaagcatgaggattactaaggacatgagctatcggtttaaaatgtttaaaagtagtttctgcaaattctaaaacagggggttgaatgacagactcactactaaacactaatactgcatcaaaaagggaggagtctgttgttgtataagtgtcagttactttaatggaatcattgaactgataaattttattatctatgatactatagttaatttggtgttgtacaaaagcttgaatccattcggacagaagtgagacgcttgggtcaccatttaatagaattgcaacatttttggaatcagatttaaaaatagtattggacatacttagtgcaggtgattttgcatctgaatttacttcgtgattttccttaggtaaaggagctccaataatgttagcgacttcttgtgctaattgacgatcgacgtggtttaagagagcaattacatttgccttcaccatgtctgatttacacttcccaacttcaaagcaaaaagcttcttttatgtgctgcttttcaatagggctcatactattgtagaaaagtttagcctgagaataaaagttaagaaagcttttactgcgacctctaattttatgcccatcaatcttttcttgataatgttcatatcctccttgttcggcttggacggttgcaggttgattgttatttaatccattaggatgatagcttgtttgaccgcgatgaatctgcatttgatgcataccatcacgttgattattatgaaaaggacatacaggctgattaatagggatttgatggaaattagggccccctaaacgagataattgtgtatctgtataggagaataatcttccttgcagaagagggtcatttgaaaaatcaatacctggtacgacatgaccagggtgaaaagctacctgctctgtttcagcaaagaagttatcaacatttttgttcagtgtcattttaccaactaattttacgggaacttcttcttctggccataatttcgttggatctaaaatatcaaaatcaaatttatgttcatcttcttctggaattagctgtaatccaagctcccattcaggataatcccctttttcaattgcttcgtataaatcttgacgatgaaaatcaggatttttcccggcaatcttttgagcttcatcccatactaatgaatgaaccccgagggtaggtttccagtgaaactttacgaaatgggcttttccttctgcgttaatgagtcgaaatgtgtgaactccaaaaccttccatcattcgtaaactacgcggaatagctcggtcgctcatttgccacatgaccatatgagtggactcaggattatgcgcaacaaagtcccaaaaggtatcatgagcgctagctccttgaggaatatcattatgtggttctggtttaactgcatggacaaaatcaggaaatttaatagcatcttggataaagaatactggcatattattacccactaaatcatagtttccttcatctgtataaaattttgtggcgaatccgcgtacatctcttactgtgtcgttggatcctttagaaccttgaacggttgagaaccgtacaaatacaggtgttttctttgaaggattagtaagaaaatctgctttcgtatatgtttctaaagattcataaagctgaaaataaccatgagcgccaaccccgcgtgcatgaacaatcctttcgggaattcgttcgtgatcaaaatgggtcattttctcacgaaagtgaaaatcctccattaaggttgggcctcttaagcccatctttaaagaaaattcatcttcagctatttttaccccttgatttgttgttaaagcatgtttgcattgattgtcagtaacgtgatgcttcaattgttccgtttttttattcacaatataggaccctcctttactctgttaattaatagataccctttttattaggtcgtaaacatgtattatcgtctttgtatgtaaaaatcataaaataccggttgtttaaatggttcttgtttgaggaggaaaaataaaaagccaaggagaaaatttattttctccttggcttttaagataattcttttcgttaaaatgcggaaattctttgcttcgtttttggtacaataataaatttgatccagagtaacccgacaatcataatgataaggctatgtaaaaattgacctgtagcaatgagtataacactcgaaaatacaatgagttgaatacttagcaatataaagattaagctaagaaattgcttcattctttctgcagtaccaatcggatataatgctacaataatatttcccgaaaaatatttccatagtgaacgaagctgcatagagatcatatataaaacgatgtaagcgatagcgccttttacgtatatatttggtatgaaatataaggcgaaagcaccgatcaatcctaagcgaatatatataccgaaataatcatttccacgtaaaaatgctagtgtatgtaagtagaagaaagttgctcgttttttatgtaataaaggttcaatccaatttgtaagccattttcttttatttacttgtttattcagttgcggaacatcggtgaaaatgctagcaaattgataaaaacgaacgttcattttttcttcttgctcgattatgtaatcccacggtattcgttttgtaggctgttttttcgtatatagaagtaggaaagcaagtagtaagagtagtccgcccaatatgagaacatttgcggaataaaacagcatgtaaatgattagggcgttacaagtaatacgaatgatcagccatatatttttttcgtgactatcacgccacatccaatgtatgtacatgttccaggctttcataatcattaacacgataaagattgtacataagaaaggtaccgttaattgcaatgattgcatagcaagtggaacgagaataaggaacgtaaataacaatgggaaaagctgaatgatgtaattgtatagaagagattttttgaaataagatgttaatttctcttctagtgctagtaaatagacagcatcaggtttttgaataaatgtacgtatagggcatctcgttataatgaatgtaagtacaatcgttataattattaaagatattcctttagaaggagatgcttttagaaactgagcataataatatgcaccaacgcatgaaataaagataaagctatatagtaaaccgttaatcatacgtgcaaagtatgtaatgatattttgaatatgttgttggaagcgactgctccatagcgattcgattgacatgtttttcacctctttgttctattatatatgttttacaaaagaaaaaacgagcaaattgcgttatgcaacttgcccgtttttcttttcgttattttttttctgatcacgattcattaatggatagaaagcaaatccaattacgaataaaccaattccgagaaggaacgtttttatatcggatgcgccagttttaataacccatagtgcgtagcaaagtgcgataactgcgactatgccatctgtaattcttgcccgcatttcatttttatatgtttcaccagttgcgactagttttaactggaagattggtgaaacgagatatggaatgaggtaggccagtgttgatacggtaataacgaatgtataagcttccgcaatggttcctgataatgttgagaataggaatacttgcgacataatgtttgttaatcgtaatgagtaaattggacttccttttttatttgttttcgtgaagaaggaagggaagaaaccttcttttgctgcttgataaggtacttctgagcttaataaaatccagcctaagatagaaccaaacagggaagtaagagcaagtaatgccatcaatttcccgccgccgtgacccattgcagcgtttagtgcatctgctaatggacgttcagaagcttgtaatttatcaacgtgaagtacacccattgttaaaattgtaattcctaagtaaatcgcaactgtaataagtaatcccgcaactgttgcacgttttaccgtttttggagaaacagcacggtttgataaaagaacggctgattcaattccgataaacgcccaaagcgttgtaagagcagctaaatttacttgtgaaagaagaccatgtgatgcacctgatttatcaatcatcggtgtgtaccattgtccaaacttagaagcttcgaatgcaaataacgtaacgacgatgaataaaaggaatccagttactttcgttgttgttgctaagaagtttagttttccagctccgcttacaccgtttgttaatataatatgagttccccaaagtaagatggaacaaatcgtaaatgtaattagttttccgacttctacgttaaacgagccgattgaaaatagtagtcgcgtatctttcataattgggaagaagagtgataaatatcccgcaaatgatgtaatgatggcaacgttacttgcccagtttgcaacccaatatccccataccatactgaagccagccatttttttcttttttggtgttgagaataaagcatatgcatgactttgtggccctgtcgttaaatcaggacgacgaattgctaaattaccgaaaacaagagctagcattaaaacaccaaaccctgtagttaaccaagctaaagtgacaccgagtgggcttgctgtttgtgccaacgtacttggtaccatgaaaataccagcgccaaccatgttaccgacaacgaaagctgttagtacccaaaagccccattttttttgttgcatagaaaaatacctccaaagttagtataaccaagtcaagcgaggagatatgtatgtcttcctgagtcaggaagagaagtcccaaacaaaacaaaaaaagcacgtaatctgccgctacatgctttctatcttataagaaacccacgacatacctctcgatagctctccacaaacgaaacgtttgtgacagttctgcacttattaaatgcagacccagcaagcgtgcatggtggacacgacttacttcggcaaccattcctttctcattccttcatcaatgccactacatctcctgaaatgatactcttaatgattgcaacctctacctcaccgagatacgaatgaggatttaaatattaaattaacgtctttaagagtaacaaatgaatttttatccgtcaatggatatagtaataatcagattatagagaagagtttgtgattaaaagtgagttaggagaggctgtaacgattattagttctgcagaagaaacagcgatagagttaagtactattttacagcacaaaggaattttgtctgacaatctgaatccgaagcatcgcttttttacaacgggatctgttttatcatttgaacatatcgctgagcgatggctagggtatcaaatttctgtagaatgtgtacatttgcctatgaaaaatgcgtgtatacataattaagatttagtaaattactttttttaataaatgaggttcgtttcataagaaggaaagaataagcttttaattgaagtgtttaaaggcatttcaattaaaggggagatttgattatggaattatcaaggtctcaattatttgctttagagtatatttcaaaatatgcagagaacgaaaaacgtggggctaaagcaacaattaatcatatacttaaaatgtcaaatattacagatgaaatatttgaagaagctgtcgctaatttaaaatctcatgcaaggattgctttacactttcatccagacagactagattcgaatatgaaaagtgttgctgaagcactgtttgagcaaggagtatataaaagtcagtttgaaacattgctatctaatggaagcgtatctgcttaccctggtggtgaacgtgacctttgggaaaagagaatatttggaggggcatatcaattagaaggcgtaacgaatgatcaacggccaaaatacggagcgctaaatttaatgttacatccagatgggccggctccgcgttttggttcatgttattttctcttatctccaaaagtttcttcgcgctctacatatacatatttagattcgcatcaagatccgaaagaaaaggggacttatgaggagtttgatatgattttagctgctcttttggaagagacattcgtaagagattttgcaattggtgaagggaatttgacgccaacaatattaattaatcatttactagctaacctgaaaaggccgtttatagatttagtaagcaaagagccagcccgtaatcttaatcattatattgaagcgcagattcatggagagatttctcttaaagaagacgtggaggcgcttgttgcagatccttcatttaagggtacggatgtagggaaagttttagaagaaatttgcctgaagtatgcgattgatttgtattggcacatcggttttgtacttatggtagacgaagttccaatggattttagaggttcaaaaatgccatctttagcaagacgcattgcacggaatcattgtatcgatgcaaatataattggctctgctgtagtagatttgaaatgcaatccattatcttggagtgatcgtggaacttatgaagaagtgcttcaggaattaaaattattatggcatgttttagttcgatttggaaaaccaaatcggaagtagaacgaaatacgctgttttttggaagtatttatatagaaaagaagctgatctatttatagatcagcttctttttataagattaaactaagtttaatacagttactttttcacgtgtcatagactcaaggctcttacgaataccttgtgcgcccatacctgaaccttttacaccgatgaatgggaagtggtcagggccgcgctctgtacgtccgttaatttgaacagaaccagtttcgattttattagcaattgcaaatgctttgttaatgtcttttgtgaagacacttgcttgtaagccgaactctgatttgttagcaatttcaattgcctgttcatctgaagaaacacggatgattggaaggattggaccgaatggctcttcccaagcaactttcatctcttctgttacgtgatcgattaatgttgggtaaattaagttacgctcacgtttgttaccgataacgatcgtagcacctttttcaacagcgtcgtcaactaaaccttgaacgaagtcagcagacttgtcatcgattaatggaacgattgtgctatcttgctctggagatccaactgatagttccgctacttgcgcttttaataagtcaacaagctcgtctgctacgttttcgtgtacaagtacacgtttaatagctgtacaacgttgaccagagtaagagaacgcaccgcttacgatatggtttgcagcatcttgtaagtcagcatcttcacgaacgataccagggtctttcccaccaagttctaatacaagtggaatcattgaagcttttttcgctaaatgtttacctgtgtttgtaccacctgtgaacgataccatattgatgccttcgtgttctactaagtagtcaccaattacagaaccgcgtcctgtcgctacgtttacaagaccttttggaaggccagctttatgtagtgcttcaaccattttgataccgctaattgcaccttgagttgctggtttgaaaataacagcgttacccataattaatgctggtgcaagttttgcagcagataagtttactgggtagttaaacggtgcgattgctaatacaacaccaagtggtgcgcgttggataatcgcaagtttagattttgtaccgcccgggaagctatcgcccatcatgctttctccgtgcatatgtaaagcttcttcgatcgtgtaacgaatgaagtcagctgtacgaacaacttctttcttcgcatctttatatcctttaccgacttctttcataatgatatcggcaatttcatcctgcatatttacgagctcatcagcccatttatataagtattttgcgcgatcttgtagggaagctttagcccatgatttttgagcttcttttgcagatgcaattgcttcatctacttctccgcgagtaattgcttgtacttgtccaattacttcgtgtaagtatggagatggaatttcgattgtttctcctgaagagctttctctccattctccatttaaataaaatttgtacgtattgctagttgtcatgattagtcctcctaaaatagcaacttgtaagagtgagtataaggtgattgtagggggtttgataacatttttcaaatgaaatgtttgtgaaaacgatttcttattctttttttattttgtatgccctttcttacagaacattcccttatttcaaaatggtgtatcatatatttttatttgaagtgtgaaaaaataattgacagaatactcaataaagttgtaagattataaatggaaaataaatgaagggggtgtgcgtaatgattgtaatcgtaaatgtaatgggcttagctctgttaaatggcagaaaacattcatatcattacgcaacccgtacggatatatagggcatctttgtcttataaaaagcgtacgttgcgtatatcgtaacgtacgctttttatgcattcctgtgcatatcgtcaagcggcggtatgcttttttttgtttattttcccttgtttggttccgataaaaaactttggaaggtggaaaaatgtgatgagattgtatgggttacgaaatgtaaatgtgatgggtctggatagtggataaagaaatgagaggtaaacgagaacgagaagggagaggttacattgttatcagtattactaaagttaaaatggttttttagggagcactggaagagatatagtattgccattggagctcttttaattgtgaatatagttgaagttattcccccgaaagtgttaggggttacgatagataatataaaaacaggaacgttatcgaacgaagcaattatgcaatctattcttattttaataggggttacaatcgttgggtatggtcttactttcgtatggcaacatcaattgtttggaggtgcatttgtacttgagaaaacgatgcgctctaaatttatggggcatttacttaagatgacgccgactttttatcaaaaaaatcgtactggcgacttaatggcgagggcaacgaatgatttaaaagcaatcgctatgacagctggttttggtatattaacgcttgtggattctagtttatacatgcttacaatcgtttttatgatgggatttacaattagttgggagcttacatttgcggcacttataccgcttccgattatggcgtatgcgatgaatatatatggaaagaaattgcatgaaagatttactgttgcgcaagatgcattcggtgatatgaacgataaagtacttgagtcaatcgctggtgtgcgcgttattcgtgcgtatgtacaagagaacgcagatcaagaaagatttcatcatttaggagatgacgtctacgaaaaaaatatgaaggtagctagaattgatgcactatttcagccaactgtgaaaatgcttgttggccttagttatttaattggtttagtgtacggcgcatatcttgtatttcaatcaaaggtgacacttggtgaactcgtttcatttaacgtgtatttagggatgatgatttggccgatgtttgcaattggcgaattaattaatgttatgcaaagaggaaacgcttcgttagaccgtgtaaatgaaacgttagcgtatgaaccagatgtaaaggatccgaaacatccaaagcttgtgcaagagccggattatattcagtttgatgatgttaccttttcatatccttcatcaactgaaacaaatttaaaaaaggtttcgtttacattaaaacaaggggaaacgcttggggttgtcgggaaaacaggaagcggaaagacgacgcttgtccgtcagcttcttcgtcaatatccgcttggagatggggatattgcagtctctgatgtgacgctggataaaatgacgaatgaaaatgtactcggctggattggttatgtaccgcaggagcatattttgttctcaaaaacagcgcgagaaaatattttattcggaaatagggaagcgactgaagaagaactagagaaagcgattgaaattgctgcgtttaaaaaggatttagagtttttaccagaagggttagaaacgctagttggagagaaaggtgtttctttatcaggagggcaaaaacaaaggatctcgattgcaagagctgttattcaaaatccagaaattttaattttggacgattctttatcagctgtagatgctcgtacggaagcagcgatcattgaaaatataagaacggaaagaagcggaaagacgacgattattacgacgcatcgtttatctgcagtgcaacatgcggattggattctcgttatggatgaaggcgcagttatagaagaaggtacgcatgctcagcttatccaaaagggaggctggtatgctgaacagtttgaaagacaacaaggtgaaagtgaaagtgcggatagtggggtgaaaatatgagcgtttcaaaacgattgtttcaatacgcgatgaaagtgaaagggacgatttttgctgcgatgttaatgttatttattttcgtcatcgcagagcttgctggtcctttcgtcgctaaaacgatgattgacgatcatatcgtcgggatagagaaaccttggtatgaaacagaacagagtgaagatgctgtttcgtataatggggctttttataagcgaagtgatcgctttgaacaaggcgagaaaaaagggaaagaagtacgcgtgatgcaagtcggttttcaatattattttgtaccgaataaagtaaatgcggaaggatcacgtactgtaaaaggggatatgattaccgttcaaaatggtaaggcggtgcaagtgtataaagcgaaagcattgacgaaagaagaagtgtttgcgttttataaaccagaaataaaccgtttactcctacttggtggtggctattttgctttattagtagtcgtatcattatttgcatacggaaagcagttcttcttgcaaaaggcagcgaacaaaattattcaaattatgagggaagatgttttttctcatattcaaacgttgccaattcgttatttcgatcatttaccagcagggaaaattgtgtcgcgtgtgacgaatgatacggaagccattcgtgatctatacgtaacggtacttgcgacattcgtttcaagtatcatctatattattgggatattcgctgcgctatttttacttgatgtaaaattggcgacgttatgtttactcattatcccgattttaatcgtttgggcaattctttatagaaaatacgcgtctgtatacaatcataaaatgcgctctcgtttatctgatattaacggaacagtaaatgaatccattcaagggatgccaattattcaagcgttccgtcaagagcgtgaaacgaaaaaagagtttgaagaattaaatggcgattattttaagtatcaaaataaaattttgaatttaaatgcagcaacttctcataatttagtatccgtattaagaaatatcgctttcacaggtgtgatttggtatttcggtggcgcttcattaagtgctacaggcgtcatttctctagggatactgtatgcgttcgttgattatttaacacgattgttctcaccgattacgaatatggtgaaccagcttgctaacttagaacaatcgcgtgttgcatcagagcgtgtttttgaattgttagaggaaaaaggagaagcagtagaagaagagcgtatgcctcgcttacaaggaaatgtgaagtttgataatgtatcgttttcttataatgggaaagatgaagtgttaaaaaatatttcttttgaagcgaaacaaggggagaccgtggcacttgtcggtcatactggatcaggaaaaagttctattatgaacgtactctttcagttttacgagtttgaaaaaggaaagcttacgattgatggtcatgatgtaaaagagatgccgaaacaagcaactcgtgaacatatgggaattgtactgcaagatccgtttttatttagcggaacagtagcatctaatgtaagtttagaaaatgaaaaaatttcaaaagagcgcatcgtaaaagcattgcgtgatgttggtgctgaaagatttgcgaacaatataaatgaagaaattacggagaaaggaagtactctttcaaccggagaacgtcagcttatatcgtttgctagggcgctcgcttttgacccagccattttaattttagatgaagcgacatctagtatcgatacagaaacagaggcgatgattcaacaagcgctagaagttgtgaaaaaaggaagaacgacatttattatcgctcaccgactttcaacaattaaaagcgcagatcaaattattgtgcttgatagaggaaccattttagaaaaagggtctcatgatgagctaatgaaaaagcgcgggcgttattatgatatgtacaaaacgcaaatggaagggaaccagagcgcttaataggtatgggagagaacttgtgattttcacaagttctttttttagtgaatcagggcagttaaataagaagtattattttacctttcgtacaataaatgctatattaaaaaatgttacttattttttgtatgtagcattatttttcccttttgtttgattatgaagaaaaaggataaactaaataagaacattttcattgaaaaattgttcaagattgcatacaatcaatatagtttttaaattcctatcagaatacttggaggattactatcatgaagaaattattttcagtgcttgcagtaactacattagcgatcgggattgtagccggctgcggtaaagaagagaaaaaagatacagctagtcaagacgcgttacaaaagataaaacaaagcggtgaacttgtaattggaacagaaggtacatacgcaccgttcacattccatgattcaagcaataaattaactggatttgacgttgaactatcagaagaagttgcaaaacgtttaggtgtaaaacctgtatttaaagaaacacaatgggatagcttacttgctggtttagatgcaaaacgtttcgatatggttgcaaacgaagttggtattcgtgaagaccgtcaaaagaaatatgatttctctaaaccgtacgtttcatcttcagcggcattagttattgcaaaagataaagataagcctgctacatttgctgatgtaaaaggtttaaaaggagcacaatctttaacgagtaactatgcagatattgctaagaaaaacggtgcggaaattattggtgtagaaggatttagccaagcggcagaattattagcttcaggacgcgttgattttacaattaatgataagttatcagtattaaattatttagaaacgaaaaaagatgcaaaaattaaaattgtagatactgaaaaagaagcttcagaaagtggattcttattccgtaaaggtagcactaagcttgtacaagaagtagataaagcgttagaagatatgaaaaaagacggtacgtatgacaaaataacgaaaaaatggttcggtgaaaatgtatctaagtagtgcattagtttcagatcgattgtctacttggatagatattatgcagacttccttcatgcctatgctgaaggaagctgtttttacaacaattccattaacgcttattacatttattatcgggattatacttgcaacgttaacagcgctcgcacgtatttctggtagtcgtattttacaatggattgctcgtatctatgtatctatcattcgcggaacgccacttcttgtacagctatttattattttctatggtcttccaactcttaatattgaagttgagccatatacagcagcagttgttggattttcattaaatgtcggtgcatatgcatctgaaattattcgtgcttctatcctttccattccgaaagggcagtgggaagctgcttatacaattgggatgacatacccacaagcgttaaaacgtgttattttaccgcaagcaacgcgcgtatcaatcccgccgctttcgaatacatttattagcttagtgaaagatacttcattagcatcgttaattttagtaacagaaatgttccgaaaagcgcaggaaattgcggcaatgaactacgaatttttaattgtttatttcgaagcaggtcttatttattgggttatttgtttcttattatcaatcgtacaacagatgttagaaaagcgttcagaacgctatacattaaaataatccttttacaaaaggagtttttgtttttatgatttcaattcagcatttacaaaaaagtttcggagataataccgtactaaagcatatagatttatcagttgagaagggggaagtggttgttattatcggtccatctggatctggtaaaacgacattcttacgttgtctcaatgtattagaaacaccaaacgctggtaatattcgaatcggtaataaagaactcgacttctctcaaaaagtaacgaagaaagatattgtcaatcttcgtacgcaaacaggtatggtattccagcaccataatttattcccgcatttaacagcacttcaaaatgtaatggaagggctcgttacagtgaaaaagatggggaaagaagaagcgaagaaaaaagcaaactatttccttgaaaaggttggtcttgcggataaagtagacttatatccgttccaattatcaggcggacaacaacagcgcgttggaattgcgcgcgcgcttgcgatggagccggaagtgttactatttgatgagccgacgtcagcgcttgatcctgaactcgttcaagaagttctgaaagtaatgaaagaacttgctaaagaaggcatgacgatggttattgtaacgcacgaaatgcgttttgcacatcaaattgcaaaccgcgttattttcatggatggcggtgtcgttgtcgaacaaggtacaccagaagaagtatttacaaatccaaaagaagaacgtacgaagaagtttttacaaatgttgcaataaattaaggaaggtctcaaggcatatgccttgagacctttttgccatatatatttatttgtggaatccgccaaggctttgctcagccattgcaactagacgttttgtgatttctccaccaactgaaccgttagcgcgagccgtagaatctgctcctaattgtacaccaaattcttgagcgatttcgtacttcatttgatcgattgcagctgttgcacctggtactactaattgatttgaagaattttggtttgccataggaatatatcctccttagagttataaaagtttttttggttggactagctggagttgaaccagattatcgccccgattggcgctaatccatcggtaattaagtttgtactcatagtatggatgttacctagaaagatatacaaaataataatttgtaaattttgtcaaaaaaacttattgatttcgtaaattatgaaataagagtaatcgttgtatttttaagaaaacaggccaaactaaggaggatattaaatataattttctcattgtagcctgctacttgtaggctaattattagcttcttatttatgatttattgaaataaaaatgaaatcggtagcaactttatagttctatttttaagtagggatggagtgggcgctcctatgtttggataggttgctctcttcactctaaaaaagagaggctttaaacgataacgtatggaggaatcatgatggggatttgcccgctttgcaatgcattagaatcacaaacatattcttgtcaaaattgccaaagtatactccaagattatgggaagtctgtagattatatagacgattatagtgcctatatggatcaagaattattaagtgcagtagatggtttaacgcataataattcaaatgaatattgcaatcatattttttattgcggagtatgtaacgtggaaactgaggttgtagtaaaacttgtgtaaatagaaaacttccaccttattatctaggtggaagtttttgtttttgtatttgtgagtgaatcataggagaagggatatgttcggtgtttgatgaagtcccggattttatctgggacattttttcctttgcatcacgtaaggaatgttcagttaagtagatggcatattcgtaaaataattggcgtgtcagttcactttgttcttttaatttggcatcttggaatacagttcgcccaggtttagagttggcttcaaataaccacggattttcctttgtgtctaaaccgatatcgaaaccaatctcaccgatgtttccagttacttgctcgtcgagtgcataacttatttgcagagctgtttgttttaatttattttcaatttgaacttgcttcgttgaatctggaaaaagctcttgtagcaactttgtatcaccgccgctatttacatgagttgttaaactgcctttgccggcgattttggcgacgattgcactaactatccaattaccgaaatgatttttatttgtatgaatgcggaaatcaacaggttgaccatcaaagcgaagtaacgaaataccttgctgtacgataaacttttttaaatcatgtccttttaatacgtggtttagaagagtttctaatgattgatactttcttagtttattttcttcattttcgcgataacgacagtagtagcaattttctgtttgagaataaaatatttgatgaatatttctaccaaagctcccgtgtattggtttcatgtacactgatttatatgtgccaagaaaccgttctacttgttcgaaatgctgaaatgcttctgtatttggtaataagggtttaattgattcgtctttcataagaagttgatgaacttcccatttattgaaaaaccctgggttaaaccatggaatggagtagtcttgttctaactttctttttgctctgacaattggtttgtaattttccgcttgtcgattcggtagtcgatcgtaaatgacgtttggtaaaggaacctttttctttatccattgtttctctcgaaagaaatatccgttaattgtttcttcttcccagtttatatgttgaacgccaaagacgaatacgaacggtcgtaatgagaatggtggtgttaacaactcactgagagcaattgaacgatttcctaaaggggtagaagaatcatcgttaaagccagttgtaaaaatgccgattaatggtccgaaaataattgtttggttttgtgtgaatgcatgaatagtagttgattgaggcagtaaaagtttttcggcaatatgctttccgataataatttcgcgagtaaaggaataatgaatttttacttcttcacttgctatatgacgtatgccgaaggagagggatgtaataggtggtgtaatagaaaaaacgtaaggtaaagtaatgctatttggatgttcatctgaaatatttaatgtatatatatgttctttcaaaataggtttacctcctttcattatggtgtaaagcgactgaatttaagtggtccgtgaaatatcttttcagctaatgaatcactatgacgaatgtattgttcgtaaggagggatcgtgttgacatacataagccagattgcacctttttgatccataattgtggaaagttctagttcaaataacgaagaataagactgatctagtgtttggaatacttcatttataatgtcgtgtaaagcgtcgtgcaatagttgcacacctgtactagatagtacgtatttaatttttgaaaatgaatgcaatgaatcatcgtccgttgctgagggtaaaagctgattaggaaatgagcttttttgtataaattgaccgataacattccaagtttgttctttgtttttttgcaaaatggttcgaatgtgcagtggatatgttaattgatttggtggttgtagcatagtgtgcgctatgtaacgtgatgaacgtatgttagatttacaccaagatataaattcgtctgtgcgtttgattgaaatagaagtatggtatttttcatttactgtatcgatctgaaacgttttatttttgtaagcgactcgatataagttatctttagaatgtatattagtggggcgtataataatatctttagtttttaacaacagtttgaaaatgttttgtatcgtcgcaatttcaaattttggtatataaggagacagttttttattagtgagaaataaatcatgtagttcacttgaattaataagtgtgttatttaaaaaggtagtggaaggacgattgtgcaaagagtgaataattgattttactttttcaaagtctgtttcctcttgaaaagaataacgatcatatatataagaaggaatagggaatgtttgctttttccattttcctgtatctgtatcgtaaataagaccagaaacaaggtctgttttaggatcaatacaaaatggcgtaaactgggcaacgacattatgataaagccgagcgcgtttagcgatttcggtgtaatacgtttgctcataatgaagtttagaagttaaaaggccgagaaccaacgaaatcactcctttactactatttgcataataggcgaagctatatattgcaaatacgtttttataccattatacttttgtccgtatgatgatatgctatagttttggagaagtgaaaggttgattgtaatgaatatatggttaaatatgttaacgacgacaggactcggagcaattattggaggatatacgaatcatttagcgataaaaatgttatttcgtcctcatcgtcctatttatatcggaaagtttcaagttccatttacaccagggttaattccgaagcggcgtgatgaacttgctgttcaattaggaaaaatggttgtagaacatttgttaacaccagaaggaatcggaaaaaagctaacaaatgaagagtttcaaaaaggtttaattcactgggcgcaagtggaagtggataaagtaattacgaatgaacaatcactgcgatatatgttagaaaaatggaatgtagcacatgtagaagaagaagcgactcgaaaaatcgaacatgtgattacagaaaaaattcatgcatttttagcagagtattatacatatacatgggaacaggctttacctcattctgtacatgaaaagatagagaatgcgattccgaatgcctcggcgtttattttagagcgaggaattagcttttttgaaagtgaagaagggaaagcgcgtctttcaaaaatgattgatgatttctttgcttctcgtggaacgctacttaacttagttgggatgtttttaggaaatgtaagtgttgtggatcgtgtgcagccagaagttattaagtttttagggcaagatgctacaaagcagcttttaactgacgtactgcaaaaagagtgggaaaagttaaaaggaagagatgtaaaagaattagaagcatttgtagagaaagaaatgattgtaagctccgtgctgtcagcagttaaagtagaggaaacagtgagtaagtttttaaatcaatctgttcagcaagtatgtgaaccagttcgagaaacaattattgaaaaagtggttccaagtgcagtaacgaaaggcttaaagtggggaacagaaaacgtagagagtatactaaacaatctacaccttgcggaaattgtccagcaagaagtgtctacattctcaacagaaagattagaagacttagttctgtctattacgaaaaacgaattgaaaatgattacgtatttaggagcgttattaggcggaatgatcgggctcgtacaaggattgttactattgtttcttagataataaggtgagtacatagaaataaaagtgaaatttcttcacatctcttgcatagtttgatatggtaagaagaggtgcgtatgtaaatgcactgaaaaggcagtgcgtatgaaaagcgctagccttctaaaggaggaaaaataaaatgacaaagaacattcatgatgttgcatatgaattacaaaaagcaatcgctgaaaacgaggacttcaaaactttaaaagagagctacgcagcagttcaagctgacacagcttcaaagaacttattcgatgagttccgtacaatgcaacttagcctacaacaaaaaatgatgcaaggccaagaaatcactgaagaagacaaccaacaagcacaagaagttgtagctcgcattcaacaagatgctaaaattacaaaattaatggaaactgagcaacgcctaaacgttgtaatcggtgacgttaacaaaattatcatgaagccacttgaagaattatatagcgcgcaacaacaagcgtaatagtggaagacgctcctagtttaggagcgtcttttttgtttagggaatttaatagttatatcacaaaaactccctttcaaaatagccatttcttattgattattttgaaagggatatgtaacacatcggttaattttttttattgctgttaattgaagttttaatatttttttcgttcaaaaacttttcaatctctttttgtttcctcccatttattttctcaaggcgtttcgtaaaagaaaaattggccttgaataagttaccatcttgggcgagtttgtctaattcttgatctagctctacgaaaatatccgtagatgatgacataaattcatagatttcttttgaaggttttttataatcagtaggtaaattattattactaataaactcatggaaattcatatcgttttgtttcgctaaatcaattagtttttgtaatttttctcggtcagattccgtgaaattcttatcaaaatttgttgaagcgagagggataatattttcagataacttccaactataatctatataattttttatattttgtttcatttcgtcttcattaatagtttcatttttctttgaggaactaaatatattttctggaactttaatagcaacatctttaatagattgtacatcgttttcttccttaggttgtgcactgtttgaacaagctgatagaaataaaattgtaagtaacatgagtggatataaaatataatttttcatcttaatctccttttgcattagtgtcgttgcaaaatagctacattccatttcaaatatttaactaaagctacgtatagatgttttattatttgataacatatgacggatattagtaagccgatgcaaaaggctatgaatacattgtaaacatcggaataactgatttgatgaaaccctttaaagaatcctaatcctattaataagataggtgaaataattaataacggagtggcaattataagtgttagaagaagcggtaatagaaagagtaatacgaaaaaggcgataatgataaatataaagtttaaaagacttaagctcataacagaaaacagtgctgtcataatgttttttaggctgcgtttcttgtcagctttactgattacatatgaaatattaagttctttagcgatagttttagggtttcctagctttttagaaatttcctcttcagatattccatcttgtttaccactaataaaatgagtttcgtactccgagataatatcctccttttctaaattaggcatattctgcagagaggaactaagttgttccaaaaattcatttttgttcataacaatcactttcctttatagaatgatgaattacagttgagaatcttatcttctttctaaacagcacaatctatatctaccttttgaagggtatatataaattataaaaaaagattccaaataatggttattccattatttacaaatatatcatttgctattgttctttgcaaggtactataaatttgttaataatgtgaataagtggaagtatttttgtacatttttagaagagatataaaaatgttattttaagataaacaaaaggttgtaagcgcattctttaaatcttgtcaaaataatatcgaattcatattgttggaaaaataatgcatttgtaatataatgataaatgatacttcaccacattaattaactaggtgaaattaaaaatctttattacacaaattatgaaacaaaggaatgattagtttgagtacaggtgtaaaagtaaacgacgtgaagacaaaaacaaaaggagcagatcttgttgttgattgtttaattaaacaaggtgttacacatgttttcggtattccaggagcaaagattgactctgtatttgatgtattgcaagaaagaggaccagagttaatcgtttgtcgtcatgaacaaaatgcagcatttatggcagctgctattggtagattaacagggaaaccgggcgtatgtcttgtaacttcaggaccagggacatcaaatttagcgacaggtcttgttactgcgaatgcggagagtgatcccgttgttgctttagctggtgcagtaccgcgtacggatcgattaaaacgtacgcatcaatctatggataatgctgcactattcgaaccaatcacaaaatatagcgtagaagtagagcatcctgataatgtgccagaagcacttagtaatgcatttcgaagtgcgacttccacaaatccgggagctactttagtaagtcttccgcaagacgttatgactgcggaaacaactgtagagtctatcggtgcgctttctaagccacagcttggaatcgctcccacaaatgatattacatatgtagtagaaaaaataaaatcagcgaaattaccagttattttactcggtatgagagcgagcacaaatgaagtgacgaaagctgttcgtaaattaattgcggatacagaacttcctgtcgttgaaacatatcaagcagctggtgcgatttcacgtgagttagaagatcatttcttcggccgcgttggattattccgtaaccaaccaggtgatattttactagaagaagcagaccttgttatttctatcggttatgatccaatcgagtatgatccaaagttctggaataaacttggcgacagaacgattattcatcttgacgaccatcaagcagatatcgatcatgattaccaaccagagcgtgaattaattggtgatattgccttaacggtaaatagcatcgcagaaaagttaccgaaacttgtgttaagtacgaaatcagaagcggtattagaacgattacgcgcaaaattatcagaacaagcagaagttccaaatcgtcctgcagaaggtgttacgcatccacttcaagtgattcgtacgcttcgttctttaattagtgacgatacaaccgttacatgtgacatcggttcccattctatttggatggcgagatgtttccgttcttatgaaccacgtagattattatttagtaacggtatgcaaacgttaggtgttgcacttccttgggcaatcgcagctactttagtagaaccaggtaaaaaagtagtttccgtatcaggtgacggtggtttcttattctcagcgatggagttagaaacggcggtacgtttaaattctccaatcgtccatcttgtttggagagacggcacatatgatatggttgcattccaacaaatgatgaaatacggcagaacatccgctacagagtttggcgatgttgatcttgtgaaatatgcggaaagtttcggggcgttaggtcttcgtgttaacacgcctgatgaattagaaggcgtattaaaagaaggattagcagcagacggccctgtcattattgatattccaattgactatcgtgacaacattaaattaagcgaaaaattattaccaaaccaattaaactaatggaggcagatttgagatgactgttgcgcaattaattgatattgatgcaaaaaaaacgaaaatgagtaatgaagtatatcaaacatctacaatgcttgcgctattagatggtatatatgatggtgtgattagctttgaagatttgaaaaaacatggtgattttggcatcggcacatttgatcaattagacggtgaaatgattgcatttgataatgaattttatcatttacgttcagacggttcagcggaaaaagtagagccagaagaaacaacgccatttgcaactgtaacgttttttgaaaaagaaatgagttatacggtagagcgtccgatgaatcgtgaagaagttgaagcgttattacatgaattgatgccaagtaaaaacttattttacgctattcgaatggacggtacgttccgtgaagtaaggacgagaactgttccaagacaagaaaaaccgtatacaccgctcgttgaagtgacgaaatcacagccaatcttttcatttgaaaatacagaaggtacgcttgctggattttggacaccagattacgcacaaggtattggggtagctggattccacttacattacattgatgatgaaagaagcgggggcggacatgttttcgactatgttgtagaaaactgtacgatccaaatttgtcaaaaagctcatatgcatttagcacttccagaaacagcagattttatggcggctgaattatcaagagaaaacttagaggataatattgcaactgcggaaggtgcagagtaaaagggaagccgattcggcttctcttttattttgagttactcccgatatgcggaacaatgctcatcagaaatagaatagttctctttaccagttaaggctgatacttctactaattgatgtccaagcccatcccatcccatactgtaacagtatataaggatgaccatttaatattcccacgagcgagtcggaaagaataatagtcgttatctgttgttactaaaactttgttataaataatatttttcgtttttttattttgtaaaataaggacaaagtctagtttatcttcttctttcggaatttgtagtattcttgctacaaacattccatttgggtttttcttccttttatgtactttttctgattctatttttagttcaggtttgcctctcataatctctccctttaacatatgcttacttctttgaaacaaacggatgtccctcataataaaaacgccacggataatgtacagcttcttctgcatagtcgatattaatacgaggtcctgctgttattttatattgtgatgatatgtgttcttcttttggaactaattcaatatgtaacgtatcactttgtaacgatacaccgcgttcttctaaagtaattccgagggcacggcatagtttgccaggaccgttcgttaaatttttgtactgcgcttttgtaatttcggtcttattgtagcgcgctagttttatttcttctattccatctaccggctcaagggctcgaatgagaacaccttgcggggtgcccgctggtgctgtaataacgttaaagcaatgatacataccgtaaattaaatatacgtaagcatgccctggtgcaccaaacataacttctgtgcggtccgttcgtctgcctccgtaactatgtgcggccttatcatcggggcctttatatgcttctacttctacaatgattccgcttcgctttattccgtctacaatatgaacaagtttttgtccgagtaatttttttgcgacttctaacgtatcgccttcataaaaagaaggaggtgcctgcattgtactatctcctttactaagtgtatatgtatatagtaaaccaaattttcagtagtaattctaactcgttctatttatcgggtttatttcataaattatggatagagtacaacagcgaagagggggagtgcgacatgatttatcgcttactagctcttaatatagatgggacactactatacaacaatggaaaaattgcaaaaggattaagagaaacaattgaatttgtaaaaagaaaagatgtatatgttacgttatttacgagtcgtaattttcaatccgctcataaagtagcaaaggcgttaaaattagattctatattagtgacacatggtggtgctttcgtttcagcaacgttagataagccgtacgttcaaagaagattatctgaagagaagacttttaacattgtgcaagtgttagagcactttgattgtaacgtacgtatttctcatgaacggttttcaatcggaaatcgtgagagaaatacaccaaacttaattgcgcgcactgtattatcaagtgcagacccgttattttatccagttcaatttgtagattcgttaggtgatgcgcttcgtgaccatccggtagcggcgccaaaaattgatgttcttttccaaactaaaggtgaaaaagaacgcgggctaaatacattaagaaaagcattccaagatgtagagtatgttgaatgtgattcaaaacgaatagaaattttaccgcaaaatgtatcaaagttacgtggattacaattgcttggagagcatttaaatatttcgctaaatgaaatggttgcgattggagatagtatggaagatttagaggttattgaaaacgtgggacttggggtagcgatggggaacgcgcctgtagaattaaagcaagcagcagattggatcacacgttcaaatagtgaaaacggtgtagagtatatgattaaagagcatttccgtaagcaattcccgcttccgtttttgaagaatcataaaaatacaccgaaacgatgacagaaaaacgtagctttttggctacgtttttttgtttatcttattaaaaacagtgaaagcgttttaaaatatgaattgtgtatgaaatctatacaattcacttgaatcctttagaaaactaatgtaaagtggatgatgttgccaaaacagttacaccacatgaaatattcttcagattaattttattgggctcccatacgtaaaagtatttccgcatgacagtttagttcacgtattatttcaaaaatgaattgtagcaatcttattaagtagttgtagtgtttctttgttttatttaaatggattattttaagttaatgtgagtaaggtttggtacatatgatatgtacttctttttgtggttttaggaagtttaaaagggggaatgaatttcttgaggaaatcatttaatcaaaaaattaaaaagttaagtagtagtttaatagttgtattactaatatgtatgaattttttaatccatttaccatttaaagcagaggcagctacaacagaattaaaaggtttaggtgatgtatcttattacaacgccatcatttttggagatcatagtgcaacgagtgcggatattgaaggtgcgatggctgttcagaaaaatatgaacgcatcaagttatacagtcgtagcggctgcaactggagcaaataacttagctggagcaacttgggtagatgaaggatatccatcattattactaggcggtcaatttacgaaagcgggagcaggacaagtaattattcaagatggaacagtggcgatgacaaaagacggtgacccagatggcgcaatgaaaacatcatatgaccgtatctcttataaagagcaagcggagattgatgctaagtttaaagaatttagaaaagacgttgatagcgtaattgaggatgcgggccaattacatactgataaaccaaaatcgggtatgacctttggaatcggtgaagatgtaaagaatcctaatatttatgtctcttcaggattagaagggcaagaaccattcaatgtaaaggatgtttatcttccaaatgtaagtaacaaagattttattgttattcattcagatgcagaagaagttaattttggtggcggtgcaatcctgtatgatacgacagataagggcgggttcacattagctaatacctctcaagcatatgaccctaattccttcttcactgagttagctagtaaagtcatttgggtgttccctaatgctaaaaagataacaactaaaggatatggtgtagtaggtagtgtgtttgcacctaatgcagttgtagaaacaaaaggtggttctattaatggacaagcctatgttggaggattacaccaaagagatggttttgaggttcataactttaaatttaactggccaaagtggaataagccagcagctgaaaaaggacatttacaaattaaaaaagttgatgaaaacgatgaaaatattgttttaaaagacgcaaaatttgatgttatagacaaagataataacgttgtggctactgttacaacaaacgaaaaggggattgcggaagttaaagatttaccatttggtgactattttgtaaaagaaataaatgcaccagaaggatatataaaagttgatacaccagtcaaagtaacaattgataatacaaacgtaattgaacttgttatgaagaatacgagaaaagtagagaatggccaatttaaattattgaaaaaagatagtgaatctggtcaacttctaccaggtgcaaaatttgatgttatcgataaagatgggaaagttgtggaaacaattgttacagatgataaaggtgaagccttatcgaaacaacttccagttggaagctatacattaaaagaagtagaagcaccgaaaggatatgaattatcatctagttcagtttctgttgatgtagaggctaataaagtagtgactgtagatgtggtgaataaaaagatccccgaaaaagtaacaggtcaatttgaaatcgtgaaagtagatgcggaagataaaacgaaagtattatcagatgcagaattcgaagtgtataaagatggtaaaaaagtagatacgttacgaacagataaaactggtaaagtagtttcacagaaattagaaccaggaaagtatacattaaaagaaacgaaagcaccacaaggatataagttgttaaaagaagaaattgaagtcgttgtggaagcaaacaaagtagtagaagtacaagtagaaaacgcaaaagaactaggaagcttacaagtaatcaaaaaggatgcagagagtggaaaagttctagcaggtgcagaatttaaattaaagaacgaagctggtcaagtagttggagaagcgaaaacaacgaataaagacggtgttgtgaaattcgaaagcttagtgccaggaaagtatacgttagaagaaacgaaagcaccagaaggttataaagcgttagaagtaacagtagaagtaaatgttgtagcaaatgaagtagtaaaacaagaagttatgaatgaaaaagtgaaagaagaaattacaggtcaattagaaattacaaaggtagacgctaataatacaaataaaatattagcaggcgcagtgtttgaaatttggaaagacggaacaaaaatcgacacattaacaacaaacaagagcggtaaagcgacttctaagaagttagaaccaggagattacactttaaaagaaatccaagcgccagaaggatatactttatccgataaggaaatgaaatttacgatttctaatgaaaaaattgaagttgtaaagcttcaaattacaaatgaaaaagatacagaaaaaggtccggaaaaaccaggtgaaggaacagagaagccgggtgaaggaacagagaagccgggtgaaggaacagaaaagccaggtgaaggaacagaaaaaccaggtgaaggaacagaaaagccggatgaaggaacagagaagccaggtgaaggaacagagaagccaggtgaaggaacagaaaagccgggtgaaggaacagaaaaaccaggtgagggagtagaaaaacctaatttaccagaaaaaggacaaggttcttctaataatcaacaacttccagctacaggacacaatacgaattacgttccattcatcggttttatgcttctgctattaggaatacgtttaagattcatggctaaaaatagctaaaagatgtataaaaggcatcagagatatataatctctgatgccttttaagtgaatacagataaaatgaaaatatctatatggaatgataaatatgttaagcttcaattacgctaagcattctgtttataaatgcagctgcgtgtgcacgttgtgatggtccttttggtacgaattgattaaattcattaccttttacaattccgtatccatacactctttgtacttcttctttagcgtaaattaagttttggtctacgaatggtagttcaacttgttttgcaaaaataccagcgtgttttagagaacgatcgatcataataacagcttcttcgcgtgtaattgtagtatttggatcaaatgtattatcaccacgtccgcggattatacctgcgcttgctgcacgattaataccgtctcttaacgatgggtgtacttgttctaagtctgtgaaattagcatttccacttggtaattgtaaagcacgagtaattagtgtagcaaattcagcacgcgttacaagacgttctgggaagtacttgccgttcccttctccttgcataatgcctctagctgctaattgacgaatgtcttgttcataccatccacctgtaatgtcatcagttacgggatttttttgattttccttatagtatgtttcagttccttttaagaaagcatcccattgtccgcgttgaatcataaacgcagggcagttttttcctgaccaaaattggtgtttttggaccttatctagagaaatatttaagtcgttcattaaataagctgccaatttacgggcattttctaccgctttttcatagtttccatcttgattaacggcaatttcaattccgatagattcatagtttccagttttatttccagcatgccatccaacttcatttactggaagatgttggtaaatctctttatcatctactgtgaaatgccaagatgcggcgcgatcagctgttccgcgtgcttgattatctaagaattttgcatgatttagagcattggcacccttcgctgtattagctgtttcgtgaatcgtaatatatttaggtaccatcgggtagccagggcgaatatcgtcatttccttttgggacaatcatttctttaaatgtaacgccataaatattgtttgtttgtagagcttctggcgatctcaataaactatttttagcagtacgactgttttttaataatgaagcttttgtaccttcaaatgtagcagaaggtgcataaatccattttgctgtttcatttatttggactttaaaccaatttccagcttgttcagtaggagttatgacttgtggctgtagtttcccttcttctttaaatgattggaacggaagggcatgtatggaagcttcttcttttacgattaatttttgattagatagtttatgaatctcttgaacttctaagctattatcattgttatctatccatccagcgccagttggcgtcgttatgtaataagcatttccttttttctttgtcgccgttacgacttgttctgtaatctcgatattcgatttgttttttaaatcattcgcggtatataatgaatgtttttttgaagtgtatagtaggaattggctagtaacctcgatatcttcttcatgagtactatgctcattaacatgctctttaatacttttaaaaacttgatcttccgtatatacttcagcggatttttcagcactctctgcaaatgaataagtaggtgcaagaacagtttgtaatgcaagagagagagttaaaacactataaaatttctttttcatattttttttaacacattagattatggaatctagtgttaacattcctcctttttatattgtattttcactatgtatcgattttagtactaataaattttaacaagagaaaatcatgatgtctatatacatgagcgatattcataaaaagaattatttgaaaaaatgtaagagaaacaggtaaaaccttctgtattgacctgtaaacgcccttcaagtaaactaaagagagtttgcaaatgaaaaggtgataatgttgttaatttcaattaaaacgttacaagatgatcgttttttacgtccgctacaaaatattggcggcttattttttgaagatagtacgattggatttgaacaagaggaagcaaatcttatcgttgatatacacattgaggataatgtgaaagcatccgctcgattaacggatgttagcacaggaaatgtgtatgaagaaacattctcgaaagatttatctgctttcacagatgaaaaagagcgtatgaagcaagtgaagcatgttgtttcttatgtatatctttctgttcttcagcagttaactggtattgaacaaagctggggtattttaacgggagtacgtccgacgaaacttcttcataaaatgcttcaaaatggtatgtcaaaagaagaagcgcatcaagagcttcgtgaaagttatttaattcatgaagagaaaattgaacttcttcagcgcattgttgattgccaattagcagttgttccggatttataccgtttgaaagaagaagtaagtatttatatcggtattccgttctgcccaacgaaatgtgcatattgtacattcccggcttatgcgattaatggacgccaaggctctgttgattcgttcttgggtggtttacattatgaagttcgtgaaattggtaagtttttaaaagaaaaaggtgtaaaagttacgacgatttattacggcggcggtacacctacaagtattacagcagaagagatggatatgctgtatgaagaaatgtatgaagcgttcccagatgtgaaaaatgtgcgtgaagtaacagttgaggcaggtcgcccagatacgattacgccagcaaagctagaagttttaaataaatggaatattgaccgtattagtattaatccgcagtcataccatcaagagacactaaaagcaattggacgtcatcatactgtagaagaaacaattgagaaataccatttagctcgtgaaatgggaatgaacaatattaatatggacttaattattggtcttcctggtgaagggttagatatcttcaaacatacgttagatgaaacagaaaagttaatgccagaatcattaacagttcatacgttatcattcaaacgtgcttctgaaatgacgcaaaacaaacgtaaatataaagtagcaggtcgcgaagaaattacagcgatgatgcacgaagcagcagagtggacgcaaaagcataattacgtaccatattacctatatcgtcaaaagaatattttaggtaacttagagaacgttggttatgcaatgccgacgcaagaaagtatttacaacattgtcattatggaagaagtacaatcaattatcggacttggttgtggtgcatcaagtaaatttgttcatccgaagacaggagcaattacgcacttcgcaaatccgaaagatccaaaatcatataacgatggctttgtgaaatatacagaagataaactgaaaattttagaagagctatttgcataagaagaaagaggttgttccgagtcggaacaacctcttttttatcctgcagtaacgggcggtccgattatatcttgtcagtttttgtcggtaagtcgatatattcgaaaaatcgctgatataattcgagttgcgctgatatattttgaaaatcgccgatatatttcaagttacggtcgatatatctggaaaatcgctgatataatttcatttaccgtctagtggtaccgtatgtaaaactatgtcgataataatcagaaaaattagtcaaatcattaaaggacaatgtctacttatggacgaaatgatagatttatgaaagagaaaagggggaaattgttggcatgtacatgacgatagggagaatttttgatttatcagttggtaagtatccgaataaagaggcgttagtggaacctgaaaagaatattcgctggacgtataaacagtgggatgaacaaataaataaaacagcgcacgctctattagaagacggagtaagaaagggagatacggtatctgtttacttatataattgccgtgaatttgtaaacgtttacttagcctgtgcgaaaatcggagcgatctttaacccgattaatttccgcttaaaggcgaaagaagtatcttatattcttcaggacgcatcctcgaaagtcgttgtctttgaaaaagcagttgagtcaactgttgctataattgaaagagattttccaaatacatctttttggtctatagaaaacgataaaccttcctatgcaagttcctaccatgaaaaagtgaatgcagcatcttctgagaaagtaaatatcgaaattgatgaaatggattattgttcaatgctttatacgagcggtacgacaggtcatccgaaaggcgtattacatcgtcatcgcgaaatgactgagcatagtatgatttgtacgtatttccttaaatataatagagatagtgtagggcttgtcgttgcgcctttatatcactgtggtgaattaaacgctggaatcataccacgcattcaagttggcggaaagaatgttattttgcatcattttgatacagaaacagtattacatacgattcaagaagaaaagattacgacgttctttgcagcgccgacaatgtggaatatgttgttgcaaaaagatttagctcagtatgatttaacttcgatgaagattggtatatacggcggagcagcaatggcaccggcgttagtaaaagaatgtaaagaacgtctttatattgatcttgttcaaatatacggaatgacagaaatggggccagttgttgcgtttctcgtagaggaggatcaaattacgaaagctggttcagcaggcacgccatgctttagccatgaagttcgtattgtgaaaccgaacgaggatgcaccggcagaaccagaggatgtattacctccttatgaagtgggagaaattattttgcgcggcccaactatgatggctggctatcataatcgtgaagaagcgaataaaaaatcgatgtataaaggatggtatcattcgggtgatctaggctattttgataaagacggttatttattcgttgctgatcgcgttgatgatatggtaattagcggtggcgtaaatatttatcctcgtgaaattgaagatttccttcatagtcatcctggtatattagatgtggcggtacttggtgagccagacgaattatggggagagcgtgttgtggcagttattgtgaagaaagatgaaacaataacagaagctgatttagaaacgtattgcaaagaaagtgatgaactagcagattataaacgtccgcgtcattatttatttgtagatgaactccctcgtaatgcgagcgggaagttgcagaaatttgtgctgagggagtcattgaaaggtgcgaaaaaataaaaaatgaaggataccccatatctatggggtacccttcatttttctatattaaacagaagaaacaatatctttgttaattctcatttcttcttgttgaaggttaattagcgcatttgaaataaggtggaaaaacaaaatggatgtaatgtccaaaaagaaaagacaccttaaggtgcctctctccgacttgaaccatttcatttcatacgaatctatccgtattaccattacccctttgttatgagtgtaaacacatactataaagcagaatcgtctatatacactagattgttagttcacaaaagacaagagatttgagatcaatattgaagtgacgccacatcccctataataattgatatgttacgccttttaaaagaatctgctttatagaacgtgcccacaagttatattttactacatgtaatattcatttagtgtattttttgatgaatatgtataattacataaactgtatgaaaaaaagagagtatactctgatgttgtgtaataaagataaagcccgcctacggaatagggggcttttcttactttttataaatatttattccaattatattatcagatgagtctaaacgaatataaacgtcatctgataaaaggtgtgcattatatattctttgtttatatgttgatatctcgaagcgttttccatttaattcacattctagaataatcatatcgccatgttctttccaatttattaatttagcagtcgtattcatataaacctcctctgaatcattttatgaaaattagtagagatagtgtgagaaaggagtttatataacaaaaaaagacaccttaagtgtcttctttgattactataaaagtcgttgaatgaaataggtttctatttttatttgcgtgaaaagccttcttcatcaaggtattccgcagcttctggataagagttgaatgtaccgtctaagtttacaccagcgtacacgttccacatgtcatcctctgaaataagagtaagaatatgaccatcttcgttctgccattcttcttctttcgcaggttctacaggtgctactacctcttcttgtgatagaaggtcaattgatttctcaattactgaacgtaactcctctgctgaaaactcacggatgttaaccatgcctttatcatctgttttataacctttaataccacttgcatatacaaatccatttccatttgggtgtaaatgaaatacaacgttctttttatctaaacgactttcttcaaagtggaagtttacacgttttaatgatacgttctttctttctagttctgggaaagattcaataatcgataatttttcttcaaaagttagcatagtgcctccaagtatatagtaaaagatttaatttgttcattatagcatagttgcaattgtttccaaagataaggggaaaacttttcgttgaatacgtttacgtcacgagaatgtaaaaagtgagctaacgaatgtatctttttaggtgtacaatggaacatggactttatacaaaggtggtttttttatgtttcaaaaaatagcaaaggaatgtttagcaggatttactgttgcgattgttgcgttaccacttgcgattgcatttggtattgccgcgacaggaacgtctgagggtgcgcttgttggattgtatggtgcgatttttgcaggtttattcgcagcgttatttggcgggacacctgggcaagtaacagggccaactggaccaattaccgttattgcaacaggagttattgcgacgcacgggttagaggcaagttttattgcctttatgatggcagggttatttcaaattttattcggtgtatgtaagctcggttcttacgttcgatatattccgtatcctgtcgtttcaggatttatgaatggtattgcattaatcattattttaggcgaaataaagcacgtacaaaatagttttttacttgttgtgttaacgattattgtaatgattgtttctggcaaatggattaaggcgattccgtctagtttagtagcactagtcggtgtgacagctttgcttcctttattttcttctctactcgaaggacttacagtaaagttaccgattatcggaaatctttcactaaataaagtaattgaaaagattggaaccattccagaagcgatacctacgcttcatattccatctttaagtggaacaggaatagcagcacttattttaccagcgcttagtattgctttattaggatcgattgactcgttgttaacatcggtcgtaatggataatgtgacaggtacacgtcataaaagtaataaagagctcgttggacaaggtatcggtaatatgatgagcggattgtttggcggattagcaggtgcaggtgcgactgtaaggtctatcgtgaatataagaagtggcggtaaaacggcactttcggcatgtatgcatagtgttatcttatttatttttattatgggtcttggttcggtcgtacaatatattccacttgctgtattatcaggtattttaattttaactggtattggaatgttcgattggggaagcatgaaaaagatgcatgtcgctcctaaaggtgatgtcgttgttatgctcgtaacgatgattgtaacggtgaagttcgatttaatgattgctgttgccttcggtattattctttcgttcatcatatatatggtgaaatgtaaagaacgtaaaacttctatcgtaaaagaaaaagaagaaacgtacacaattcaagggccgctctctttcctatcagtagatcgtattttctctactttacaagatgtgaagtcaccggttgttttacgtatgaaagatgtgcgttatatggatgtatcaggagctatggcattattaaattttgttgagcaatcaaataaagtaggagcaagtgtaaagcttgagcaagtacatccgagtattgaaaaaacaatcgcagtaatggcaagcgatgaacagaaagagcaattgaaaatcttaagtgtttagatagtaattagaatatctcacaattttacataaattataatgtagagttgtgggatgtttttataatgtttttagtaatatgtatcgcagtgacagagaggaagggctcttttggcgtaacagaaacgcttatagtgtgtacatatataatggaaggaattagaaaaatattgtgaagagacaggcttaaatgggttcgcttttctattttgaaaaaaaaaccaagtattcaacctataataaatttgttatgataaccaatgggataaaatgaatccctatcgcttaaaacaatatgtttgagagtatatgtataaaagaaaagagaaaaaatatgaataaaacatttgtaaaaggagcagcaattttaaccattacaacttttttgtcaaaattgcttggtagtttttttcaaattccattacaaaatattgcaggagatgaagtgctcggtatttttcgccttgtttttcctgtatatatgattgctcttacattatcggtagccggagttccacttgcaatttcgaaactaattgcagagttgaacgaaaaaaataagcaaaaggaaattgcgaaattatttaaatcagcgtcaattattgggatagcatttggcgttttcggctgtttagtcattgtattattttctattgaaattgcgaatatgctcggtggacaagaaactagaatgccgttgcttattacttcattagcattactcattgcgccatacatggcggtgtatagagggtattttcaaggtttcggtgatatgaaaccaacaggggtatcacaggtcattgagcaatttgtacgtgtgttttttatgttaataattgcttacatactagtatcatgggataagagtaatactgttattactagtggggcgatggttggctcttttcttggagtcattagttcgcttatatatttgcgtataaaatataatagaagtccatactacaataaaagcaattcctattcgctccgagatttaagagaaaacggcaaaaagatattgcgggtatcgatcccaatcgctatcggagctttatcaatgccacttttaaatttagtagactcgcttacaataccgcatgtattacaaggatcatcaacagaaattcaagaacaatttggaatatacagtcgcggttttgcattcacacaaataattgttatttttgcaagtgcaattgtatttccgttaataccactcttaacttccgcattggccaaaagagatataaatttggcgaaaataacaattcaaaatacaaatcgactagcgcatgttttgacagcaccgttaacaatatggttgatggcattaaccgtaccgttaaatgtcggattgttcacagacgtaaaaggcagtagtatgttaacagttatgattggcagttcgtattttactgcggttatggtattatcaataggtgttttacagggcattaaccgttctgcacaagctgcatggattgttattggtgcgagttgtgtgaaagtcatgctaaacatgatgttcgtgcagaagtttggcatagatggagcggcgtatagtacattaattacttacgtattgatttgtattgtaaatcatttgtatattcgaagctatattgcctattctattcatttaaaaagctttttcggtgtgctagcaatagcatgtattttgggactaggattgtatgaattatgtaatgtgatagatgttacaacttcaagaattatgacgttattattcagtggtatagcattaagtattacaaccattttgtatggtgtatgtgctttgaaattaaaatggatatcaataaacaaaataccatttttgaaaagataaatatagaaatttaattttttattataattcatatgaactgataaagaggaaactatgtagggtatcaagtgtttaggtaaggaatgggtactagtttatgttagatgaaataaacggttacctagttttggaggagatttagggtgcgtttagtcttatcaggatattatggtttttataatgttggagacgaggcgattctacaatcaattattgaatcgttaagtaaagagaacccggatatagaactagtagtactatcaaatgattctaaatatacaaaggaaatgtatggtgtagaatcggtagatcgctgggatataaaagctgtttatcatgcgataaaaaacagtgatggagttattagcggtggcgggagccttcttcaagatcagacaagtacgaagagtattctatattatacgggtattatgggactcgctcgattattaaaaaagccgtattatatttattcacaaggaataggtccaattacaaaaggatataatcgtctattagtaaaatggaacttgtcaaaagcttcctatgtatcagttcgagatgaggattcgtttttatatttaaaagaacttggcataaaaaacgatattgaaattgttccagaccctgttttaacatggaaacggacaaaacaatcggattggttgcaaaagcattcgatacatggaaaagtaattgcggttagtgtgcgttattggaatgcaaaagaagattatataaaaaaattagctgcggcattaaaaaaattaaagcaagaaggataccaaattctatttgttccaatgcatgagccatttgatcaaaaagcttcacgtgaagtagtagacttaatgggagaagagacgtatatgcttccatataaaatggatatcgacgagaaaatattcattttatcacaatgttcattactaattggtatgcgtcttcatgcactagttttttctgctgtagccaaaactccaatggtcgggatttcatacgatccgaaaattgattcgtttttaagtcaagtgaatcagccagttataggaagtgtggatggcgaatggagtgctgagtatttatatgaaattgcgaaaaagcaattaatgcaacaaggaactgtgcagcaagagttacaattgacaatagatgagcttcggttgcaaggcaaacaggcaacaaagaaactcattgatcatatggaaaaaggcactttattaaaaaagtaaagtgtcttttgttttgttttgaatttaatgaaaattctaattaaaaaacgttttattttaattcctatttattatgctaaaatgattgtgattattatataatcaaatttgtgataataaattcgtagattacgaggaggataaccttgaagactttttcaaaaggtataacagcagtggcattaacgggatcattacttttaactcctatttcaagttatgcggcaaatgatgatattacaggacatatgtttgagacgaatatgcgctcacttattactaaaggagttttaatggggtatggagacaatgtatatgcgcctgataaattagtaacaagagcagagtttgctacattcatagcaagggctttaaatttaccgaaagctgattcgaatttcgaggatgtgccgaagacttacggtttatatgatggtgtaagtagagcatatggagcgaaaattattaatggtcgtacgaacgagacattctcaccaaatgatgtgattacacgtgaagaaatgtcgataatggtaaagcgagcgttagactataaaaatattaaagtagctgtaagtccgcttacctttactgataaagatagtattaactataaagagcatgtacaagttatggtggctactcaaattattaaagggtatccagaagataatacatttagaccacatttatcagctacaagagggatggcttcagctatgttggatcgcatgcttcagacgattgaaaaaaacggaaatagcaatcctgtagaaactaagaaatatgttgtgacaaatgtaagagaaaacggaacagagcaagaagtagagcgctataatacgtataaagaagcggttacggctgctcaaaataaaggtatgaatgcggtaaaatacgagaacgaatttttatggattaaagatggttttgcaagtgcgaaaagaataactgggcaaaacatcattaatatttatgatgagaatttatcaacagtatatacgtatattcagtatggaacagaattgaaagtattagaagttggcgaagatcgtgtgaaagttcaactttctggtttgacaggttatgtgaagaagaatgaaatcactttaattcctacaaatgaaatgaaacagtcgtcttattatgtgaaatcagatggatatttataccataaatattatacatataatacaagttcacctggatatacagaatttagatatggtgtggcaccttctttcatgaagcaaggacagcaaatgtatagtgtagatggaaagacatttggagacgaaactttctatcaatatttcaattatttatcattacgttcgaaaacagattatacagctgaacaactagatagttatgtgaaatcgattaaaccagactctccattaattggtttaggaaagaaatttaaagaagtagaaagcaagtataatgtaaatgcattattcttatattcattagcaattcatgaaagttattatggaacaagcgctcttgcaaaagacaaaaataatttatttggtttaaaagcaacagacgatagtccgtatggtaacggagaagcattcaattcaaaagaagattgtattgaacatgcagcaaaattatacatgaatgaaggatatttaaatccaggacattggcgttatacagcaacatatacaggtgataaagctgctggtttaaatgcgaaatatgcatctgatgcgaactgggggaaaaaagtagcggggcatatgaaccgttttgattcttatttaggtaaaaaagaatacaacaagtacaaacttgcacgtgtgatgaataacgtggaagtgaaaaagaatcctagtatatcaaatgagcgactgtatcgtttaaatacaaatgtagttgtcacagttactggtgaagagataataaatggaaaagcgtgggttaaagttatttcagataatcctactgtaacagaagcgtatattgcaaaagaaagcttagaatacgtaaaacattaattaaataaaaaagaaggtgctactaatatttcgtagcaccttctttttattcaatttcaaaatcaacaatgatataagcgagtataacaacgaagaaaatactaacggctggtgctgttaatacgtggccagacataaagccaatgccaagtgatagaacgagtgtgctcgctaatagcatatactttactttcatgattttcttaaagtttgtgatcatgcggataaataatttaataccaaagtatagaagaggtattaagtaaataaggaaaccgacaattccaaaggcgaaaaataggtcatggaagtccatttcaattaatttaattttatctgtgtagttaccagcgtaacccattccgaatagtttttgtgaaagcggtgcgtctttatagtattgtttgtatgtttttaagaatttgtcgcgatcactgtaaattaaactttttacttcagaatctgtaagttcaccttttgcatgtttttttgcatcttctggatctgctttaattacttttccttcttttcgatctttctcttcttgtactgattttttgtattcgtatatttgcatgtgaatgcccatattttttgcgataggagtatgcggtgtaagagcaattaaacctcctagtataactgcgacaacaacggtatttacaatatgtgtgaatccttttccttcttttttacgatttatcatatattcaatgaatgagaagaaaagtgctacgcctaatgtaataacaattgcgccatatccgactttcgttccgaccataatacttgcatacatcgcaagtattgttggaatccagtaatatattttcgagaaagaagttgttttatgaatcgaatataagacaatgattgggaacataatggcgaaaagagaacttaaatcatttccagcgaagaaccaacctcttgaaccgatttttgagtgaggatagcttgggaaatccgttccagtttgcattgcgacaatcattgtaatgcttaaaattaaagttgcatataagaaatatgtaatgattttatggaatacatactctttattttttagctctttaaaggcgataatatatccaaacagtagcacaattggatatacgctctttaagatgaatttaacttcttctccaaatgaaactggagatttaaccatcatattatttacaagaccgattgcgagtgcgatcccgagtaagcacaaatagaggatgtactttttcgcatcttgttgtttgtgatgaagaagtaggtaccctaatgcaagaagcataaaggcgaaacggactacaactccaactgttgcgctcatgtgtagtatatagattgaaaaagatgttaataaatctaaaattggttgaaacacaatgaatagcaataggaaatgtgggaagtagttatccgtttgtttcaacttattaaccatatgttcctccagttcttcattcctttattacaacacctaaaataggggtataaagccttttttacatagtaaggcgaatgaatttcaatatttgtttttttatcaaacttaagaatacaccatttcattgtaatggtaaatagatgaaaagcatggataaaccgactttaatttctatatttttcaacggaattgtatgttttatacggtaaatgtacaaattgcgagattattagacagaaaattgagaaaaaagaaggatttttcagtggttttctataattatataagtataatctttatggagaaaagaggggtatgtaatggaagtaacgagtaaaacagaatctgttattgtgaaatatgaaggtaacgttgcaacggttatggtcaatcgcccagaggtgttaaatgcgttagatgagccgacattaaaagagttattacaaaagttgaaagaagtagcggaaagttctgcgcatatcgttgtgttatgcgggaacggccgtggtttttctgcgggtggggatattaaatcgatgctttcaagtaatgatgaaagtaagtttgatggcattatgaataccatttctgaagttgtcgtgacattatatacgatgccaaagcttgttattagtgcaattcatggaccgactgcaggtcttgggttaagtattgcgttaacagctgattatgtaatggcggatatatcatctgttattgcaatgaactttattggaatcgctttaattccagatggaggcggtcatttcttccttcaaaagcgtgtcggtgaaaatatgacgaagcaaattatttgggaaggtaagaagttatcagcgacagaagcgcttgatatcggcttaattgatgaagtaatcggcgaagatttccaaacggctgtgaaacaaaaaattaatgaatggtcacaaaaaccgattaaagcaatgattcaaacgaagcaaattttatgtgaagtaaatcgctctaatttagagcaaacattgcaattagaaaagcgtggtcaatatgcaatgagacaaacagcggatcataaagaaggaattgctgcgtttttagagaaacgtttaccagtatttaaaggggaataaagtgaagtgaggattttgtccattcctcactgattattagctcgttaattcgggataaaggggagaaagtgctaacacattttagtataattgtgttagcactttttttaaggagtaatacatgaagaaaatgatcggtgttattactattattttgcttacatattctgctttgcatagtacaccatctttggcagttcggactgcgttgttttttgagggacatccaagtgttgcattttctgacggggtgacgaaagaaaaagatgtgaaaaaagaagcgattccagatgagtatcaaactctatatggtaaggacgaagacttagagcactatttctttccacatgtaagagcacatggatcaggaattgatatgttaagtgcgtgcgtgaagaaaaaatggtttttctataaagcagagctcggatgttattaaatataggaggatgaatgatgtcagcatataacaagttagtaagagatcgtgttccagagaagattttaatgtctggaaaaacatatacagcacaaaaattaacagggcaagcatacatacaggctttagcgaaaattggaacggaagaaattcgtgaatttgcttctatgaaagaacgcgaacatgcgctagattctcttgcagatgcactagaagttatcatctcattagcacgtgcagaaggtgcatcgattgaagatgtagaacgccttcgtaagcaaaaagagatagagcgcggtggatttgaaaaagggatttatttattagacgtttcagaagaatagttttataggaaaagcatagcgttactgagtaacgctatgcttttttgttgcaatgaagctaataatgaagaagatagctgttaatatccagccgattgtaatagaagtagtagtgtgaatggcataagagatttgtaaacaaaataatgatgctaaaaaccaaatgagtgcaatgtgtatatatttttttgatatattcatattttataactccttttatatactaaaaagaattttactacaatttagaaaattaagctatataagtagaggttttctggtgaattttgtatactgaatagtagagaaaaagaggaggaaacgacaatggcacatcatgcgaaagaaacgatggaactgattaaggagcttgtctctattccaagtccatctggaaatacagcaaaaattattaatttcattgaaaactatgtcagtgagtggaacgtagaaacgaaatgtaataataagggagctcttattttaacggtaaaagggaaaaatgatgcacagcaccgcttattaacggcacacgttgatacgttaggtgcgatggtaaaagaaattaagcctgacggtcgcctgagtctttctatgattggtggatttcgctggaactccgtagaaggggaatattgcgaaattgaaacatcaagtggcaagacgtatacaggaacaattttaatgcatcaaacatctgtacatgtatataaagatgcaggtgaagcaaaacgcgatgagaaaaatattgaagttcgtattgatgagcgcgtattttcagctgatgaagtacgcgaattaggaattgaagtaggagacttcgtttcatttgatccgcgcgttcaaattacagagagtggatacataaaatcacgtcatttagatgacaaagtaagtgttgcaattttattaaaattaattaaaagattacaagatgaaaacataacattaccatatacgacgcatttcttaatttctaataatgaagagattggatacggtggtaactctaacattccagaagaaactgttgaatacttagcagttgatatgggagcgttaggtgatggacaagcatctgatgaatatacagtatctatttgtgcaaaagactctagcggcccgtatcattatgcactgcgcaaacatttagtagagcttgcgaaaacgaatcatattgaatataaagtagatatttatccgtactacgcatctgatgcatcagctgcgattcgcgcgggatttgatgtgaaacatgcgttaattggagcgggtattgattcttcccacgcatttgaacgtacgcatgaaagttctattgcgcatacagaagcattagtgtatgcatatgtaatgtctaatttaattgaagaataatttcatagataatagagagctgattaaagatattatttttaatcagctttttatttggcaaagcgattaggagacatgtcctaatcgcttttttatcccgctatttgccgggcagtaagactcctacctcaaaattcagcgaaagcaaaaaagttagatgggggcgggctgcccgtaaaagcccgattggtgagggctgattaaagtttttatatacattcattataagttatatatatgcgatttttgttatacggccggaaacgtatttactatagatatataatgttatacactatgaaagggattaattaatagttaatattttttagttagcttgattaaaaaaattgtatgaatatgaagttttgagaggagatttatttttcatgaagtacaaagcaatagccgcaggtttattagcagcaaatttactagcacatccaattagtagtttagcagaaacgaagaaatttcctgatgtttcagatagtgcgtggtcaaaagacgcaatttattatttagtagagagaaatgtaattaacggtatgccagatggtaactttatgccatacggaaatttaacacgtgctcaggcagcaaagattatcgcaacagcaattggtgctaaaatagatccaaatgcaaagccgtcttataatgatgcaaaaaatagttgggcagcttcatttattgcagccatggaaaaagagaatattattaaagggcgagaaccaggagtatttgatcctgaaggaaaagtaactcgtgctgaaatggcagctatgcttgtaagagcatataatctgaaaagcaaagtaacaggaccagttcctacaaaatttgctgatttagagaatcattggggtaaagaagaagttaatattttagtagaattaaaactttcattaggtacagaggatggctggaaaccgaatgattctattacgcgtgaacaagcagctcaacttactgcgcaaacagataaatttagcaagaatagtgatcgtccagtagaaacaaagaaaatgtacatagatagaaaattcattacatatcacgcaccatcattaagttctgggattagtgcaaatcagcataatccacaaatggttgaaattaaagaagaacgagatggatggatcaaaattgcaacaagtaaaggtgataaatggacacctttagtagagaaaacagaagttattaatgaaggattcactacttatgcagaagcttcttcttcttcaaaagtaatgggaacacataacgcacaacaagtaactgttattgaagagaaaggcagctggattcgtatccgcatgggcgctggtttccaatgggttaataaaaatcaattaaatccagtgaagcaaggtaacttcttagaaggaaaagcgattatcattgatccaggtcatggtggagcggattcaggtaatccaggttattatgagaaagaaagtgaaactgtattagatgtatcactacgattacagaaaatatttgagaaaaagacaccatttactgtgttattcactcgtacagatgatacacgtccaggaacaagtgcttctgattctttaaagaaacgtgtagaatttgcacaaaaaaataatggggatatttttgtaagtattcatggtaatggcacggaagagaaaaatggacaaggtacagaaacgttctactatgaatcagcgacagcaagaggaacaaatcctaacgtatcagaaagtcgtttactagcagaaaaaattcaagagcgtcttgtagatgcactgggaacaaaagatcgtggtgtgaaaaaaggcgatttatacgtaattagagaaaatacaatgccagctgtattagcagaattagcatttgtagataataaaagtgatgcagataaaatagctacaccagcgcagagacaaagtgcagcggaagctatttatcaaggtattttagattactatgaagaaatgggtaacaacgtgtcttctttccgttaataaataataagagattgccattggcagtctcttttatttattaacgtttctctttatttccggcatatgatatcatttaattttatatacaaaagaaaagtatttgagtaattgtaatcataacaattttaaacgatagaggatgataatagattgaataatcacagtaaaacacctgcctgtatatatacgtatgcatttcgtgaggaggagcgtgctttatgttacttggaaatgcgctcgttctttggaatggagtcccacgttaatattttaaaaagtgatgtcaaaattgacccgagtagaagtgcgtttattaaagagcgaattgaagttatgtatgaaggggacgacttagaaagcattttaaaacaagtggaacaaattgatttggcgggagcgacgttcaaagtcatcttcgttaaaattaatgaccttgttggagagaataaaattgaatatggagaaagacgtcttattgaaagagacctcggcatgcatattgaaggagaagcggatgttcgtaatccagagcgtgtattcgggattgttcctcttggaggacgctggtacttcgggcactatgtagaaagcgaaccagtttggtatcatcacataaaaaaaccgcatagttattcgacatctcttagcacacgtgttgcgagatcagttgcaaatatcgctgtaccaaatccagagggagtacgagcaattgacccgtgctgcggtattggaacagtagtagtagaagcactttctatggggattaacatcgttggtagagatataaatccacttgtagttcttggaacgagaaaaaacatcgcacatttcggatttgaaggaacagtaacaaaagggccgatcgaggaaattactgagaactacgacgttgccattatcgatatgccatacgacttatttacgcatgccacaccagaagatcaactatcaattctctcaagtgcacgccgcatcgcgaaaaaagtagtcgttgtcacgatggaaacaatggacgacatgatccatgaagcaggattcgaaattacagatcgctgtattacaagaaaaggatcatttactagacagattcttgtttgtgaataagaaagaaaggtcacccgtttgggtgaccttttttgtttgtattgatgtgtaatcggttggtggtttaggtagatgaattagcgaaatttgtcggtaagtcgatattacatgtcgaatcgccgatatattgtgttgaatcgctgatatattccgagaatcgccgatatcgttacattagaatgttactgttcttttaatttctcttgttgtgcaagtagtaaattgcgcaagatgtgcccgcggtaactttctagttttcgtccttcatgatagcgtacgcctaatttttttagttcagctacgtaccagccctttgttccgtaatacattggatcacttcctttttgcttttgaacagtatatgttgggggtggaagtaactttccagtgaaaataataagactggttgtatcaaggggctccataacatagcctctggacagtgtataaaaaaatagacagtaatgtatgcttttttaaacaatgtatacaaatttatatcctatgcgttggcatgatatttgcaataaaaagagtatcaacatataggggagagatagaaatgaaggttagtaaagtgtacacaacaattgatgctcacgtagctggggaaccgcttcgaattattacgggcggcgtgccggaaataaaaggagacacgcagctagaaagacgtgcgtactgcatggaacatttggatcatcttcgcgaagttcttatgtatgaaccgagaggacatcacggcatgtacggttgtatcattactccgcctgcgagtgctcacgctgattttggcgtattatttatgcacaacgaaggatggagtacgatgtgtggtcatggcattattgctgttattacagtcggaattgaaacaggcatgtttgaagtgacaggtgagaaacaacagttcattattgatagccctgctggggaagtcattgcgtatgcaacatataacgggagcgaagtagagtccgtatcatttgaaaatgttccttcctttgtatacaaaaaagacgttcctattaaaatagataactatgaatttcaagtagatatcgcgtttggcggagctttttatgcggtagtagactgtaaagaatttggcttgaaagtcgatttcaaagacttatctgctattcaagcgtggggcggtaaaattaagcactacatcgagagcaaaatggaagtgaagcatccacttgaagaaggattaaaagggatatacggcgttattttctcagatgaaccgaaaggagaagacgcaactttacgaaatgtaacaatctttgctgatgggcaagtagatcgttctccttgcggtacaggaacttccgcaagaatcgcaactctttttgaaaaagatgctttacaaaagggagaaattttcgtccatgaatgcattactgacgggaaattcgagggggaagtattgtcggtaaccgcagtagatacatatgaagctgtcgttccaaaagtaacggggcatgcctttattacaggatttcatcagttcgttgtagacccgagagatgatttgaaccgtggatttttgttaggatagaaggagggggtggaaagatatgttagtcataagcgcgaacgaacaaagaaacttagtaaatatgaatgaagttattgaatacgcggcgcttgctttaaaagaattttccgcagaaagaacgattacaccaataaggggctcattaccatttgcgaacgagcgaaatacggcattaattatgccttcagtagcggaagggcttgaggcacttggcttaaaagtagtaacggtagtcccgcaaaataaacagataggaaagaaaacgatcaacgggattgtgatgctatcagactttcaaacgggagaaccgctcgcacttttagaaggatcgtacttaacgatgattcgaacaggcgccttatcaggagtagcgacaaaatatttagctcgtcataacgcaaaaactttatgcattatcggcacgggtgaacaagcgaaaggtattgctgaagcaatatttgcggttagagatatcgaaaaagtcatcttatacaatcgcacagaagaaaaggcgtatgcatttgcggaatatatacaagagagattcaacaaacctgcatatgttcacacaaatgcaaatgaagcaataagcgaagcagacatcatcgtcacaactacgaacgcatccacaccagtcttctcagaaaaactacaaaaaggcgtgcacataaacgccgtcggctcattcaaaccgaacatgcaagaactaccatcccatgccatcgcgggagcaaacaaagtagtagtcgaatcaaaagaagcagcactagacgaaacaggagaccttcaagttccgataaaagaaggtctattcaaagcaaacgccattcacgctgaacttggtcaaattataagtggagaaaaagctggacgcgaaaataatgaagagattactattttcaaatcagttggtttggcagtagtagatattattgttgcaaagtatttgtatgagaaagcggtggagtgcgggattgggaataggattgagttttgagggactgccttttggtggtcttttttgttgatgtggatgtgctagtatttataattgaatccttttaatattatgttgcaatgtatgaattctgtgcggacatcaaatcattcattcaattggtatatgaaaaaagttgcccctctaattattagaggggcaactttttaccattctcgccattcttctgttatatcttcctcggattctaagccagctattcgtgctgctgtatcgataaattcatagagatcttctctttccattgtttcaataaaatagtcatgttcgtcatttaattcatttatgttaagaacaacctctttaacaacatgcattatttcaatttcagttggattttttcccaatttctctaaattatttatgtaagtatcaagaactttatttgttgcacttatattttcttcagtgaaaaattccccatcttcatcattctcaatccattgggttgttggtttgttttttttcagttcatcaaatgtcatgataacctcctaaatgtgttttttgtctttaatcccattctacattttcggtcatatataacaatcattttagagtttttttgtaagctactagttttttaactcattttacgaggtaacctattcgtggtcttcttttttaatcctccttataaatatattttatggcaagaatgtattagtagatttcaaactttccacatttacaaaaaagtttgactttacatacaggtagtggtaatttaaaacttataagaaaactcgggattaattccgagttttcttatgggtataactagtttgagggggccgaaagatgaaacggaaattatttgcattaccatttgttctaatactacttattgcattagcggcttgttctggggaaaaagattcttcgaagcaagcgggcactagtaaatcagggactccgaaagatggaggagggttaacgattggtgttagcgataatccagatacgatgaatccgctttatgcgaatgatcgtgtgtcattaactgtgcagcaggctttatatgcgccgctatatcatatggaagacggtaagaaaaagtttgttcttgctgagagctttacgccttcagaagatcaattaacgtggacattgaaattaaaagataatttgaaatggcatgatggtaagaaaattacatcagacgatatagcatttacattccaatctattttggatgagaagcaaaatagctcaagtcgtgaaaactttatttttaaaggaaagccgcttgaggtgaaaaaggtagatgagttaacaactcaattcgttttaccacaagtaagcgcatctttcgaaggtgtaatgaatgatttcttcccaattccgaaacatgtatttgaaggggaagcagatttagcgaagagtaagaaaaacttacagcctgtaggatcagggccgtttaagtttaaagagtataaatcagatgagtatgttgcattagatcgatttgatgattatgtaggtgggaaagctaaattagactctatcgtataccgcgttgtaaaagaccgtaatacagcaaatgtttcactgcaaaatggtcaaatcaacatgaaaatgattgagccgcaagactttaaaaaactagatagtactgggaacttctcaatggtgacattccctgaaggtagattattctacttatcttataacatgaatacagatttgatgaagaaaaaagaagtgcgccaagcaattgcgcatgcgttagataaaaaagaaatgattaactcagcattcgtttcgggtgaatttgcagaaccagcaaattcaatcttaacgccagacgctatgtattatgcgaaagatattaaaggctataagtatgataaaaaagaagcgaaagatttattagcaaaagctggtgtgaaagataaagaaaaagtacgtgtgatgtatgtaacgaataataaaattatggaaagcttagcgctttatacacaacaaaaattaaaagaagttggcttagaagttgaactaaatgcattagatgctagtgcggcaagtgaaaaaggcttagataaagagaataaagaatatgacattacatttggtggttacataatgggacctgagccagattcatataaaagcctattcttaagtaatgctgaatacaactatgcacgatataaaaacgctgatttcgataagttatgggaagaagctgcagttgaaacggataaaacaaaacgtgcagagctataccataaaattcaagaaacagctagagaagatgtaccttatctaccaattgcgtatccgaaagcagttattgcagtagataaaaagtttgatggattaaaagaagcgaaagcaattcctgtcacaatgtttgaagatctatctaagatttatgaagtgaaataagaaacaataaagaagctggtggaaatcagcttctttagcttgaggggggaagtttgtgtataaagtaattgcgaagaggcttttaaatgcaattccgcttttatttgttatttctattatttcttttctattaataaagctagcgccgggggatcctgttcgaaactttgtaacgccaaatatgagtccaattgatgtggagcgtattcgtaaaagtttaggactagatcaaccaatttacgtgcagtattttttatggttaaaaaacattttaacagggaactttggttattcacttcaaaatcatcgtcctgttttagatcttatcgcagaaagattacccgcaacaattgggttaatgggatcatctttactcgtctcattcgtaatcgcaataccacttggactatttacaggtgtgaaaaagaattcgttctttgaccgcattgtaaactttatttcatatgttggtatttctatgccggttttctggtttgcactactattagtctacttattctctttaaaattgaacctacttccgagtatgggtatgcgcaccgtaggtaaagattctgtttgggatattgtgcaacacggcattttaccttgtatggtgctagcgttccaaaacgtatctgtttatatgagatatattcgttcaagtacgattcagcaattagaagaagaatatgtacaaattcaatatgcgtacggtgcttcaaagaaaacggtgttatttaatcacgtacttcgaaatgtattaataccgatcattacaattttcggattatcgattccaagtttagtaggcggagcatttattacggaaacagtattttcatggccgggtcttggttcacttggggtaaatgctatttttagatttgattatccgattatcatggcaattacattactatcatcattcatgttaattctcggtaacttaattgctgatattttatatggcgtagtagatccgcgcattcgaatgagggggtgatttggaatgaataataggagatttcaaacgataaaacatagctttacgaaaaataagtttgttgcaatgggagttattatacttgcgattttaacggtcgcatcaattttcgcattcgtatcgccgtacgatcctagcaaaatgtcgattccagatcgcttacaagaaccgagtatgagtcatcctttcggaacggatgattacggaagagattacttaacgagagcgttatatggcggacgagtttcacttgcggtcggttttcttgcgatggttgtttctattacaatcggtaccgcagttggaacaattagcggatattttggcggaaagttagacaacttcttaatgagggttgttgaagtacttatgtcaattccatcattctttttaatgctactattaaatgcgtatttaaaaccaggaattacgacgttagttcttattatcggattactaacatggatggacaccgcccgtattgtaagggcagaaacgttatctgtaaaagagcgtgagtacgttttatacgcaaaagtatcaggacaaaaatcacttatgattattgtaagacatatcattcctaacattttatcaaccattattatcgctgcgacattaacaattgcgacatcgattttaatggaatcatcacttagtttcttaggtttaggtattagagaaccagattcttcttggggcagcatgctaaacaatgcgcaaggatatattggtgaagcttggtatttaacactcttcccaggattccttatccttttaacggtacttagttttaacgtaattggtgaagcattgaagaaagctttcgcaccaaaaggagccggacatgaaaactaaagtgttaagtgaagggagtgagaagcgtgtctgaaaaactactagaagtgaaaaatttaaagacttcttttttcatagaaagtggcgaagttgaagcggttcgcggcgttacatttcgcttaaataaaggagaagtagtcggtatcgttggggaatctggaagcggaaagagtgtaatggcgaagtccgttatgtctctcgttacgtcaccaggaaaagtgaaagaaggggaaatcctttttcataatgaaaacatactttctaaatctgaaaaagaattgcgttctattagaggaaatcaaatttcacttatctctcaagacccaatgtcagcgttaaatccggtcgtgaaaattgggaaacaaatgatggaagtaattatacgtcatcaaaaagtgaaaaagaaagaagcagagcaaatcgcggtcaacttgttaaaacaagtcggtctttcttcaccagaagaaagggtgaaacaatatccgcatgaactaagcggaggtatgaagcagcgagttatgatcgcaatggcgatgtcttgtaaccctgaccttctcattgcggacgaaccgacgacagcacttgatgtaacgatacaagcacaaatactagatttaatgaaaaacttaaaaaacgaaacgaacatggcgttacttcttattacgcatgacttaggaatagtcgcacaaaactgtacacgcgttatcgttatgtatggcggacttattatggaagaaggacctgtacttgatattttccaatcgccgaatcatccatatacgaaagggttattaaactctctgccgaaaatatcgaacggcgtaaaagagagactcgcgccaattcaaggtgtaacgccaaacttattaaacccgccacaaggttgcccattcgcagagcgttgcccgcatgcgatggacatttgtgaaaaagaacgtccaccatattttgaaatcggaaacgaaagacgttccatgtgctggctaaacgatagggcggtaggtgattttcatgcatgaagaaaacttaattgaagttcggaacttaaaaaaatactttcctattaaaaaaggactattcggcagaaaaacggagcaattaaaagcagtcgatgacttaagtttcacaattaaaaagggtgaaacattcggattagtaggagaatctggctgcggaaaatcaacgacaggaagaagcatcattcgtttacaagatgtcacttcaggtaacgttttattcgacggaaaagacatcgcaagtttaaaggaaagtgaactaaaagaatatcgaaaacgaatgcaaatcattttccaagatccatacgcatcattaaacccagcaatgaacgtattccaaattattagcgagccaatgaacattcacggctcttacgaaaaagaagaacaaaaagaaatcatattagacctgctcaaaaaggtaggcttaaaagaagaacatttatatcgctacccgcacgaatttagcgggggccagcgccagcgcattagcatcgcgcgcgcactatctgtaaaaccagactttatcctatgtgacgaaccaatctcagcactcgatgtctcagtccaagcacaagtcgtaaacatgctgcaagacatccaagaagaaactggagtcacatacttattcatcgcacatgacctatcgatggtaaggcacatatcagaccgcatcggagtcatgtacttaggaaacatagtagaaattgccgacagtgaagacctatacacaaaaccggcacatccatacacacaagcactactctcatccatgccagaaccagatccaacaaacattggcaaagaacggattatcctagagggagaagtaccgagcccactaaacacaccatccggctgcaaattcagaacgcgctgcaaattcgccactgaaaaatgcgcacaggaagtaccgaagatggttgagattgcgaaggggcatgaggtggcttgtcatttgttttagagggagagcactaggggggacctggtgcttttttcttttgtgttggggtgtgggattggttgtagattaatggtcagcgactgtctatatttgtatctcctatcatataattccctttattctttaactataatgctgggaaagcacgtaaagtaagacaaagtattaaaaatcatcgtgatgaagtgtatcgtattgatgtatgtattgtagaagatccgatggaaagagaaatttacgaaacatatatgattaacgaatttcaagcaaagtataatgtggataaagtattttataaataacatcaacgtaaaacatgatcttggtactacatcaagatcatgttttttatatgtaataaaaacaattgattattcttaatcattcgacaagatgcaacaatttaagatcatattttttgctatgataagtaaggaatttacatatcgtgttattgggggataaaaagagatgttgaaaaaatttactacatgtattttaggtggcgctttagtattcaatttatctggttgcggcaatacatccgacaaaacttcttcagaatctaaagaaaccaattctaaacaagaagaaaagaaagtgcaaacaaccgatgaggcgaaaacgaaagaaaatacaaagcagaaaaatacagaacaagcaaaagagaaatcaaaaataaaagaaaaagagtatgctgtaaacaaggattttcatacacctaaatttgatgtaactgtaaaaagagttgtagaaagagataaggttggtaaagagagtataggattccaaaaacctgaagatggacatgtctttattgttgtagaagcagaagggaaaaatatcacaaacgaaccgatgaaattagccgttttaccatcagtggatttagtggatgaaaatgataatgcttaccaaagtgatgtgttggcagctagtagttatgcggttgaaaaaggcgagacctctagtattactaagggattaaaaccaggggaggtaatgagagaaagtaaagtttacgtgattaataaagaaaaatttgatacaggaaagtggtatgtagttgttaaccatgagtataaggaacaaattaaatagtgtttatttatgaagaggagatggctcctcttttttttacaagttaacacagaatttctttataatgtagaaatttaatgttttcgaaaaaaagaattgacttctacattagttgtaactaaaatggttacataaagatgtaattaatttagttacaactaatatctgctaaaaatatgatttatatatttaattaaggatggtggtccatacgttgccacccggtgtagaaagttactaacacattcaaatcaatgcatattccaagctttagtattttctgttacggggcaataaggtgcaatgttatcttttgttaaaaaccttggtggatctttctttggaaatattagttttggggaaatatagtaaggtatctaaaaaagaacaaggtataaaaatatgtacttatataaaccaaaaatttagttgagctggataataaaaaaggtaggagatttaaatggagacgaaacaagataatcttatttacgtatgggatgcatattgtggatggtgctatggtttttcagaaagtattaaaggattttacaaaaaccacactgaattaccattaacggttttatgtggagggttatttttagataatttaccaatgaaaaacttctcatatatagaagaaggaaataaaagaattaatcaacttacaggtgctgaatttggtccttcatatcaaaaattggtggaggaagggacttttaaaatgaattcgaaagatgctgcaattggcttttcagctttacgctcattagcgccagaccgtttattagaattcacttcggctatgcaaaaagcgttttattatgagggccaaagtctgagtgatcctgaaacatatcgcaagattgcaatcgagcatggtttggaccctgaacaagtgttagaacgtttaaacgctcaagaaacaataatagatgtccaaaatgatttcaataaagttcgacagcttggtgttaatagctatccttcattacttttacaaaaggataatcaaattattcctattggtggtggcgtaatgacgccggataaaattgaagcgcgttttaaaaatttatattaagaaaatttaggatatagtagcaaacatgttatcttaggccacctgacattgatctccggaatattcgctagtactattacactttcagataaatgggagtgggagattttatcggaacaagataaaaatatgataattagttaataactttaacaaaaggagaataacatactatgtttaaaacaatcgatacaaatcaaaaagatgtgaaattaacggtgtttagttcggacgaaaaaagctttatggtcacagcaacattagttgagaaagcaggacatgcatttttaataaactcaaaatttactcaatctgattcgaaagaaattgttgagtatctgaaaaaaaacaacttatctttagataaaatctttattattcatggggatccagactactactttggattagagagcattaaagccgtttacccagaagctatagcgtatgcaacagagtctactgttgaacatatcgttcattctgtcttagggaaattaaaagtttggaaagacgcccttggagaaaatgcaccaagtaacgtggtattacctcaagtatttaaagaaaaagcgattgattttcaggggttaacatttgaactagtaggcttagatcattacagaactagcctatttaataaagaactaaaagtattaattggtggtatcgatgtatttaacgaaatacatgtattcttagcggatactagctcaaaagcggctatggaggcatggattgagaacttgaaagtattacaagcattacatgctgacataattgtgcctagccatggatcaatcgaaaaatccctaaataatcaagcacttactgcgacaatggattatctaagaacggcggttcaagcttctgaggaaagtggaacttcaaaagattttgtggcaaaacttgaagcagcatatccaggctatgcaaataaaggtgtattagaattaagtgcaaaagttgtaacaaaagaaatgccttggggttaatgatatgaataaatatcaaaaactattacatgaaacgtatgtgttaactggcgaagggaaattggatgcgttcaaaacgtatttaagtgaaaatgtatcttggacagaagctgctgggtttccatatgcaggtacttatataggtccagatgaagtagtgaaaaacgtacatgaacgtcttggcacagaatgggatgactatagcgctaaagatgaaatttatgcttttaataacaatactgttatcgtttatggaaaatatagtggaacatataaaactacagggaagtcatttgtagcagatttttgtcacctttataagtttgatgagaacgataaggttaagaagtttattcaaattgtggacagtgcaactgttaatgaggtattaagttagagttaatcgtttctaatatgccttgtatagggggaggttaggataaatgaaattcctaacattatccctgacattacattttggggaaggtttctccttcttcaagctttttatagaagaaaacttatttaagtagaagaggtaggtatatatgaaattagagaaaaatttaatcataacaattatttctgtatttattttaggagtagtttcgactttggtatatcaagcttccaccggtaataacaaagggaactcaataaagagcgaaaatgtcgcttctgtatcaaaagaagtaaaagaaaatgaaaagaataaaaagatggtagttgatttctataatgaagtttttaacaaacataatatcgatattatccctaaatatgttagcgaagattataagcaacataatccttttgttgctgatggacgaaaagccttcatggatttctttaaggaggattttgttaaaaatcctaattcctctgcagagattaaacgtgtagtagctgaaggggatacagttgctcttcatgtacactctcgtactaattctcaagataagggagttgctatagtggatatatttcgtatcaaggatggaaagattgtcgaacactgggatgtaattcaagagattccaagtgaagcagctaatgataatacgatgttttagatagaagatatatttaataattgtttaattgatagtgctgtatagagtttagaaatttagataattagtcatcaaatttggaaatcatttaaaaatagcatattaaatgatggcacaaattaatacgaaatagctctttaataaaaaatcctactcattaaaaaatgagtaggattttttattaaagaatagtgctaattttgtggttcggcaccatctaaatttggaaaccatgaaagtataggtactctatatccacgtaaagtaaaatcgtaattttttccttcttttatgtttgcttgcagatccactgaatgaaacttcatcataagaaggctatcctcattagaaataactttttcggttccatttttttgctcaacctagtacaatcttaccaatttaaaaaagaccaccattactgaagtgcaccccaattgttagacacataactaacaattggaggtgcattttttaacttttttaaaaatcaaccaattatcaggattcaaattgtatgatttaatatgaatcttttctttttttgttggctttttaccatttttcaattaactcacctcccttcgatctgaaaccttacggttcatttcgtataacttagttttacttctgcgcattttttaacaatttcatgccctttcataattcgtgttgctaatagtactccgttcatgcttttcactctccttaagatttattgacttaatggatatatgtaagttaacttgcttttatctactcacaatctgattaaaatgcttttcaagaaactcttgcattctatcagctataaacaaccactttttccctctagactctgggtaataaacaaaaccaccgttattaatatccaatatttttttataacaaggtttgtaaagaatattttgtgttaaccaaccataactatatccagtagctttttttaaatccttcatttcccaccatgttttttcttttttcacttaaaatcctcctcataatattgagatactcgatattaatctataaaaaaaagatactcaattggtaatcctaacttttttttaataacttgcatctcataatccgaaaatgaaaatttccctttttccttcgcagagtatgcgtctctattgattcccaatgcaattgccatttctgcaatcgtgatatcacgtgccattctttctctttttaaaattcgtttaggttttaaatatttctttctaatttcttctttaacagtcattgtgtcacctccgaattatccgatgaccaaataatatcgcatatctcgatattattcaagctatacacaaaaataatattacgatgtacaatatttttattgtgtcacgcgttattttagagtatactatccttatcgtatcaatggatggaggtcacttgaaattgaaaaaaaatattctgggtccagcgatcaaatatttacgtaaatacagaagaatgactcaaaaagatttagaaaaagttactggttataaacaaagcaccatatctggtcatgaaaatagaaatagcacacttgatgagttagatatacaaaattatgcaaaggcattacaggtaagtccccaaagtttctttacgatagcagaaaagctggaaaaaggagaaagaattactgatgatgatgtatcagggattatcactataaacaaggatcaggaaacagaagatgatcctcatatggtaatcgcagctcacatggaagataatctaagcaaagaagaactacaagaggtaatggacttcattaattttgttaaaagtaaaagaaaataggagcatttatatgaacaagttggaaacacttatagcacaatatccagaaataactttcaactttaataatgagatgcctaatgggttaagtggactttgtgttggtagtgaaatatatatcaataataatcttaatcaaaccattgcagaaaagtacgtaacagttagtgaggaaatagctcactttgagaaaggcataggtaatataattaaacaggaaactattaccgaacgtcagcaagaattccaagcccgaaaaataggctgcctccgaattgttacaattgatgctttaatactatgctatgaaaaaggcatccaaacaccttgggatatagcagaagaacttgaagttacaacggcttgtgttatagatgcatttgaatatatccggatgacaaaaggagtatctttttatcataaaaattacttagttcatttcttaactgatacacatataaacattcaaaagttttagcgaattttattttgaatggaggagaaaaacttggcaagctttgaaaaaagagcaactggttggaggtatcgcgtttcttataaagatggagataaatacaaaacaaaaacccaaggtggattctcgaccaaaaaggaagcagcaattgcagcaagtgaattagaaaaaaaaataagtcgtggacataatttaaatgcagaagataaactattctccgagtatatgagagaatggtttgaagtatataaaaaaggaaaacatagtctatcgcatgagaaaaaccttttacaatctgtaaaattagtcgaagaacattttattggtgtccgtatgaaagacttaaatagagttttatatcaaaactttttaaatgaattatctaaaaaacgtgctaaaatgaccgtcaagaaaaaacataactgtgttaaagcatgtataaaatatgcaattgaagatggaattttgcatagagaccctacttacaaagctatcatacatggagagaatgaaacaaaatcagaagaattaaagtttatcaatcaagaagagatgaaaaacatagtggatgaattacgcgcaaatttgacaccacaatacatttcaagatatataattctttttgccatagccactggggcaagatttggtgaaataatggggatgacatgggactgtatagacttagaagaaagaacaattacaatcaataagacttgggattatcgtgataagaatgactttggtaacactaaaaattatcaatctgtacgtacaataacaattgatcaggaaacagtgagtatgttaaaagatttacaaaaacaccaaaaagaacatgctctgaaaacaggtttaaggaatactaaaaatttgtgctttattaataatcaaatggaagttataacaaataacgctgtaaacaaagttcttaaaaagatttgcgcaaggtgcaatgttaaaccaataacatgtcattcattacgccatacacatgcatctatactcttatacaatggcgttaatataaaatacatttcaagaagacttggccacaaagatattgtaattacactacaaacatattcacatgtcttagatgaaatggaacaaaaggaatctagaatcgttgatcaaactatgttgaatttgttccaatcagttatataaaacgtgcaaaaatcgtgcaaaaaaaattctaaacgtataagtttatttgaaatagatagttcctacaaaattatataagtccagttatatcaaggttttaagaaaaaacatgtgattatttaaaaatctaaaagcgcgcccagagggattcgaacccccggcagacgtggtaccggaaaccaccgctctatccgactgagctatgggcgcatgattatagaaaacacttcattttcttctcataataatagcaataaaatccatctaaatcaataaaaatatccccgtaataccttatgcatcttagctaaaagcatataaaatccattccacccctaaattttccaatcataaattctccccaactcacaaattataatctttgaattgatattccaaagggggcttcattcaatgactgtaattacaaaattaaagcagactgtttctggattaaaaagtgcacaagctagcttagagggattcgctcttgatacggataaccaacaagctaagcaacttttccaaacagctgcgcagcaaacacaaacgattatcgattctttaaacccacgtgttgaagaagtccaacaagaagaaccacaatactcacagcaataacgaatcagtcttgctgtgaaatagaaaaaggatgatatgcagtcatcctttttctatcacattacatattgcaatagaaatggaatgatgattatgcgaaagattggacttataaccgcgttatttatacttctatttagttcttttaccggttgtgatcatagcccattagataaaaaggtaaagaaagaagaaacaaaacgaacagaaaaagaaaagggtccaaaattaacaaagatgagtacagaatcctttaatcaatctatatcgcaaggagctaagaaaaaggccctcgctatggatgaaattataaaaagcgcagcagtgaattcaaatttagatctctacatagcggttatacctgagcatcatgaaaggtttggattaaaacctttgcgcaagaaacttcaaaagcaactaagtgatgaatatcctactttcgatgttcgtgttagtacagataaaaaaatctttatgttactcgaaaagcttgcaaacaaaattaagaaaaaagaagtatctaaagatgagatcaaaaaacagttaaagctaatcggatcagaaatggaatctaacacttaacgctttcgaatagaaaaggaaggattgcaatgtcaagtaaagataaaaacttaacccctgtacaacaggaatacaaaaaatttgagcaagaacgcgaaccgaaacgccctgttctaaaaaattgtttaaaggcctttttcgttggtggttttatctgcctaatcgggcaactgatatcaactttttatattacgtatttcgattttaccgaacgctcagcaggaaatccaacagtcgcaactctcatttttatctcaatgttgctaaccggattcggtgtatacgatcgtctcggtcagtttgcaggcgctggaacagctgtacctgtcactggatttggtaactctgttatctccgcgtgtattgaacaccgaacggaaggttttgtactcggtgtcggcggtaatatgtttaaactagctggttctgttattttatttggtgtattttccgctttcgtcatcgcacttattaaaactattctcgttcaatggggagggctataaatgttacaaggacaccgaacgtgggtatttgaaaacaaaccagtcattatttcaacaggggttgtcggtggaccatttgaagcaaaggggaacatcccagaagacttcgatatccttcatgaagatttatggctcggacaagattcctatgaaaaagcacataaaattttattcgaagaggcttgtagtcgcgctactgaaaaagcagaacttcgtaaagatgatattcagttcgtactcgcaggagatttaattaatcaaattacccctacaagctttgcttgccgcacactgggcactccttatctcggattattcggggcttgttctacttctatggaaggtttagcacttggggcaagtatcgtaaatgcaaaaggtgcaaaatatttattaactggagcttcaagccataatacagctgtagaaaaacagttccgctaccctaccgaatacggtggacaaaagccgcctactgcacagtggacagtaaccggagcaggagccgctatattaagcgatactggacacggtccaagagtaacctctgcaacaatcggccgagtggttgatatgggattaacggatccgtttaatatgggaggcgcaatggctccagctgcagttgatacaattgaagcccatttacgtgaacgtcaaattgatgcctcttactacgatttaatcgtaacaggcgatctcggacatgtaggacgcgaaattgcttatgacttactacataaacacggaacgaaagtaacgagcgaacaatttcaagattgcggaattatcatttatagagaaggacaacctgtcatagctggtgctagcggacctggatgttctgcaacagtcgtgtacggtcatttattaaaccgaatgaaaagaggagagttcaaaaaaatacttgtcgttgcgacaggcgctttactatctccacttacattccaacaagaagaaacgattccgtgtatcgctcacgccgtttcgattgaatttggaggtgcaacgcaatgatttttttctgggctttcgtcattggcggactcatatgtgtaatcggccaacttatgtttgatgtcggcaaactaacacctgctcatacaatggcaacactcgttgttgctggagctatattagatggatttaatttgtatgagccattaattgatttcgctggagccggggcaactgtacctattacaagctttggtaatgccctcgttcatggcgcaatggaagaagctgcaaaacatggcatcgttggcgttattaccggcatgtttaaagtaacgagcgccggtgtatcagcggctattattttcggcttcattggagcattgttattcaaaccgaaaggataagaggtgtttatatgactgttatcgctagcgtaaaaacttgccttgctagtgtaaggggcgctcaagcaagtttaagctccctttcattaaattcacaagacgaagaatcaaaacgcgtatttcatgaatgtatgttagaaatggacagcgtcatcgctgatttaaaggatagaatttcagtattagaacgtgaagaacctcaatataaagggttttaagtagactggaggaaacgactatgtctcacctgccggaatggacacttgtcattcttcgctctgtattcatattaattattttattcgctattacgaaatggttagggaaaagacaaatctctcagctttccttttttgaatacatagccggaatgacgattggtgacatcgctgcccaagtatctacagggctcgattcaaaattttttcacggcgtctttgcgatactcattttcgctgtggtaccttttttaacaggaatcctctctttaaagaacaaaacagctcgggacttctttgaagggaaatctaccgtattaataaaagacggaaagatactcgaagataacttaaagaaagaaaaatatacgagtgacgaattactggaacttctccgtggaaaaagtgcgttcagcgtagctgaagtcgaatttgctgtcttagaaccgagcggagaattaaatgtattattaaagaaagattcccagccacttacagcaaaagacatcggtttaaaagtaccaaacgagaaagaaccacaaactgttattatggatggaaatgtactagatgaacctctttcagcaagcggacataaccgcgcttggctacattcagaattagaaaaactcggtgttgttattgaaaatgtcttcctcggtcaagtggattcatacggacaacttactatcgacatttacaatgacaaactccaaatgccttctcctcaaaacaaacctttattattagcatctttaaaaaaatgtcatgctgatcttgaactattttccttagaaacaaagtcgaaatcagcaagtgaaatgtatagtaaaaacgcgaaacaaatcgaaaagattttaaataaagtaacctatcttttaaaagactaattatcgaaagaacgcttcagttaaaaggcgttcttttcttttttctccagttttcataacgtttaaatttatgtaattcggttatgatgttgaagatacataagcagggaatttcgaaaacatagcgaatatttcatggtacaactacatatttttttgatttaaagtggtttcgtttgacctttattgaccataattgtattataagactaagaaagctttataaggaggaaataacagatgaatttaattcctacagtaattgaacaaacaaatcgtggagaacgcgcttacgatatttactctcgactattaaaagaccgcatcattatgcttggtagtgcaattgatgacaacgtagctaactcaatcgtttcccagcttttattcttggaatctcaagatccagaaaaagatattcacatctacatcaacagccctggtggttctatcacagcaggtatggcaatctatgatacaatgcagtttattaaaccacaagtatcaacaatctgtatcggtatggcagcatctatgggtgcattcttacttgcagcaggtgaaaaaggaaaacgttatgcacttccaaacagtgaagtaatgattcaccaaccacttggcggagcacaaggtcaagcgactgaaatcgaaatcgctgcaaaacgtatcctattcttacgtgaaaaactaaaccaaattcttgctgaccgcactggtcaaccacttgaagtactacaacgcgacacagaccgcgacaacttcatgacagcagaaaaagctttagaatacggtttaatcgataaaatctttacaaatcgttaataactaaaagcgaaagcggctcgtttagaatcgcaggtcgctggagctggatacaactaaaagtggaagcgccctataattgggcgcttcttttatatattgttccccgctcacataccccatccagtatctctctaaatatatcagcgatttttcaaatatatcgaccgcaactccgattatatcggcgattattttaatatatcgacgtttcgacataacttatcgacttaccgacaattctcgacaagcacgtaccccttaaatacccctcctcgctaattcgcacagacaacaaaaaagctatcgcatatacgcgatagctttttattgtacatatgcagctaatgcttctaaagcctcttctgcatctgaaccttctgttgtaattgttatcatgcttccagttccaattgctaagctcataatccccattatgctctttgcatttactgtctttccatctttctcgatgaagatatctgcatgaaagcgatttgcctcttgtacaaacaacgcagccggacgtgcttgtaaaccgttttttaatgaaacttgaactcttttttgaaccacagctccatttcccctttaacctcttatttttttgctaccgtttcccccgcgcgtaatttctctgcaatttcatcgattttacgcaaacgatgattaatacccgacttactaatcttccccccggataccatctcacctaactctttcaatgttacatcttgataatctcttcgtaattgtgcaatctcttgtagtttatccggcaatatatcaagaccaactgtctcatcaatgtagcgtatattttcaatctgccttagtgctgcaccaattgttttatttaaattagctgtttcgcagttcactaaacgatttacagaattacgcatatcacgtacgattcgaatatcttcaaatcttaaaagtgcattatgagcacctataatatttaaaaactctgtaattttttctgcttctttcaaatacgtaatgtacccttttcttctctccagcgtcttactatttaaatcaaatccgttcatcagttcacatatagcatcattatgttccttatataacgaaaagatttctaaatgataagatgatgtttctgggttatttactgaaccacctgctaaaaatgctccgcgtaaatacgatcgtttacaacacttcttctcaatcaattcttgtgatatatttcgaataaatgaaaagtcatctcgaacaatatgaagatcagctaatatttcgcgagacttctcaacaagccgcacaatatatacattatttttcttcaatcgcatttttttacgaacaagtaattctaccgtcacgtcatatccttttttcaaaagcgtataaatccttcttgcaattgccgcattttccgtttgaatatcgatagatagacgacggtttgaaaaagaaagcgacccgttcattcgaagtagcgctgataattctgctttctcacagcattccttcatctcaagattcgtcaactctttctttgtttctgatgcaaatgacacagtcaacacctccttatacgattattgcggaacaaaattcttgtcctatatgaatgaggagcgctacctcaaacgaggcaacgcatatttataacaatgaatataaaatcgaagctaactttaacgtatcatgccttacaacatgatcatcatacttcgctaatccctcttgaataacatcaatattattttcaacaaaacgttcttcatccactacaactggtgtagacatttcttcatcatataacttacgtaattcacaaggaatctcacggttatttacaattgcagtattgataaatggttgccctaaatgatcgtgtaacgcctgcacatgatcaaaagcagtatatcccatcgtttcacccgcttgtgtcataacgttacatacatataccttcttcgcctttgcagcaagaactgcgtctccaattttgttaacaactaaattgggtaatatactcgtatacaaacttcctgggccgaaaacaagtaaatcagctcgtttaatctcagccaacgtttcatgcaatggctctacatcttctggagttaaaaagacgcgattaatcttctttccgtaataaggaatctttgattcacctgttacaatttctccatcttcaagttccgcatgaagtaccgcactttgattcgctgctggtaatacacgtcctctgacatttaatactttacttgtttccgtaattgcatggaaaaagtctcctgtaatcgaggtcatacctgccaataatagatttcctaacgcatgacctttcagtccgtctcctgttgtgaaacggtgctgaaataaagcttccaccagtggctctacatccgataacgcaacaagtacgttacggatgtcacctggaggtggaatttctaactcatcacgtaatcgacccgaactgccaccatcatcagcgattgtaacaactgctgtaatatcaacaggatattgctttaatcctcttaataaaactgagagtccagttccgcctcccatgatgacaattttaggttttctctcttttttcatcccttaatggccctttctcttctccacatcacgatgagatacatgaacactatactctggtttcaaatgtttcccaaggtattctgtaagcgtaacagaacgatgctgtccacctgtacatccaattgcaattacaagttgacttttgccttctcttttataatgaggcagcatgaaagtaatcagatccgtcaacttctctaaaaacttatgtgtctcattaaatttcagtacatacgaagaaacttcttcatctagtcctgttaatggcttcatgtgtggaatgtaatatggatttggtaaaaaacgaacatcaaatactaaatctgcatcaattggaataccgtacttaaatccaaatgacataacatttacacgaaatgcttgctcagtttctgttgagaacaagtgaacaattttttcacgtaattctttcggttttaaatccgatgtatcaagcacaatattcgctcgtgccttcatatctgttaataaattgcgctctgcttcgattccctttaacggcaaaccagttggtgcaagtggatgcgaacgtctcgtttctttataacgagttacaagcgtactatctttcgcatctaaaaataaaatatgaggaataatccatgtacgttctgataaatcatcaagtgctccccataaatgttcgaaaaactctcggccacgtaaatcaataccaagtgccactttattcattttcccttttgaatccgccataagctcaataaactttggcaataacatcggtggtaaattatctacacaaaaatatcctaaatcttcaaaactttgtaaagctactgtttttccagctccagacatccctgtaataattaccatttttatatcattattctctgtcatcgtatcctctccttgacggtttaactcggatctaatcgatatgaaagcaactcaaaatctggggtatatacaaatgtaccgtagattatgccatttcctttaattaaataatcaataatgtgataatctcctggcgccattgctaaatcatcaattttatcaaatgtatgccaaccaatgatgccttcttcgctctctagtttgttttctcctgcaaaatctgtcgctaaaaaggagaacatcatccattcagaaacaactttatcaccttcttggatgacaaaggtgaagaccccctttaacgctgggtttttcaaataaatacctgtttcttcgcgatattcgcgaacaacggaatctcttacagtctcaccacgctccattttcccgcctggtgcaacccaccaattccggcgaggtttttggagtaagagtacttcattatctctaattaacacacagtttgtcactctttgcatgtttcttcacctcagctacttgcagtaaaattcctcactgcatacttctttcattatactatcaaaaacagtttgctacaacgaaggagccagtcctctttcgctaagcatatgctactcagcaattttaaaaaagctttctataacaagcaatgtaaatgcttagacttttaatgaatagcatgaaaaatccccttaacgctttttatcgccaaggggattaaagtacttatttcttaccgaaataagtaacaatcgcaaatcctaaaataaaggtaatgattgaacttataattgaaaatccaccagtcggaatcccagggaatacaattacaatcgaaccgattacaagtccaataattgccgcaaatgtcatacttttataacgatctaataaaaaactaatgcctttactacttacaacaaatccaaccataacaccagcaccgataaccacgattaaaggtaagttaagtgtagttaaagcgttaattgctgttggatacacaccaataattaataaaataaacgatccactaatcccaggaagcagcattgccatactagccatccatcctgcgaaaaataaaccaattgcatttacaattgttaaagtcgtaattggatctgctgccttatctggtttaaagaaagctgtaatcgcaacaagaattgctgcaactattaataaaacgatgtgcttacctttaaacgacgactttgcatcagcttccctcattaacatcggtaatatactaataattaaaccgaggaagaaaaattgagtcggttcataatgatttgcaagtaaatatttaataacgtgacttaacgttaaaaatgccgctgccacaccagctgcaaggggaattaaaaatcctaaatgttttttccattcacgactaaagaatccactaattgccgcaagcaattgttcataaatccctaacacaacagcgattgtaccgccgctcacaccaggaattaaatcactaacgcccatacaaaatccacgatatatattacgccattccatactgaataaattcctcatttcttatagtgattttttccgtaaagtccagtatatcaataagaaagcttataatccttatattttttgacaaaactttgacattttcacacaaaaaaagaagaaagctcctgtcggtagctttcttctcacaaggtatattatcccttatttttctgatacagtttttaattcctctaataattcttctacgtaatgttgtgcactttgcgctgcaatactaccgtcacctgttgcagttacaatttgacgaagcattttttcacgaacatcaccagctgcgaaaataccagggattttcgtttccatacgctcgttcgtttcaaggtaaccattttcatttgtaatacctagttcaacaaatggttttgataaaggtaacataccgatgtatacaaatacgccgtcagttttgacttctttctcttctccactatttacgtccacaagtgttacacttcctactttaccacttgcttcgttgatttcttttatagtgtgattccaaatgaaatctactttttcgttttggaaagcacggtcttgtaaaattttctgtgcacgaagcgtgtcacgacggtgaacgatcgttacttttgatgcgaagcgtgttaagaacacaccctcttcaacagcagaatctccgccaccaattacgataagctcttttcctttaaagaatgctccgtcacatactgcacaatatgatacaccgcggccgccaagttctgtttcacccggtacaccaatttttttatactctgcaccgcttgcaacgataattgcacgtgctttatattcttttttaccagcaataattgttttgtattctttaccatcgatgacttttttcacatcaccgtatgcatattcagcaccaaatttcttcgcatgctcaaacattttatttgataaatctggtcctaaaatagactcataacctgggtagttttctacatcttccgtgtttgccatttggccacctggaatacctcgctcaagcattaatgtgcttaaatttgcacgagatgtatatactgcagctgtcataccagctggtcctgcaccaataataacgacatcataaattttttcttctgacacactattcactcctatccattcttacacaattaagttaccctcattatactgttagcatcatttttttcccaatgatttgcttatcttatgtgtgcgtacgcttaacagcttgcacatactttcggacagtcgctacagatacattatatacatctccaagctccgactgtgtcattttatttccttgttcgccgcgtacaatgtattcaatcgcagctgaccagccgtacacatttgtaaatatgtctccagatgtatataaacgtatgaacgtacaaaaccaaaagtgtaaacactcttcgattaattcatcatcttttttcgtataattgtataatgcatccgcaattctcgcgcactgctcaaattgctgtaaatcagctggaatactcttatgactattaagtaaaaagaagtactttgcaagttgcgatacgatgggaacaccgttcttcgcttgcgttatatcaaagaagaatccaaccttctccggcgttgacaattcattcattaaatataaagctagcatttgttcttctagcgtcgcactttgctgaaatgattttcgtaattcttcaaataacacattttgcccttcatctgctaaattcagcgcattccacggttcttttccctttttatcaggatgtaattccacgacatattgccacattttttcagctagttgctggtctttcaccatatacgcagaatatgcaaaccaataataaaaactaacgtctccctcatatccttgacgctttaatagtttgaaccacttatatgcatgctcgaaataaccaattgttgcgagtgtagttcccagtttcaaacgatgttcaaatgaaatcggatataccgaaactagctgtcccgctaatgcctctacttgtttatgctctccaattgaatatagaaaaataagcgtattacaaagcgcatgtatattgccaggatttttctctaaaatcatttctgttaacttcagtgctttgtctacattaccagattgaaaatgtgcaatggctaaattattatgacctgaccaaaattccggataatctttcgtaacaatttctaatgtagcaattgcttcttccaattgtccattacgaatatagcgattcgcttcttcctgcataacaattaaatcatcttcatcttcaatctcttccgcacccattgcttcttcttccataatctcaagaagttctaacgtatcttctacgaattccttctcttttgcaacttctaaataacgatctgcatatttcttcgcctgttgaaataaccccatatatgcataattatttgcaataaaataatagcactgttcaagttctggattagatctaactaactttaagaagatttgattcgattcttgatattcaccagcctcagataatactgatgctaattgacataaaataaacggctccttctcactttgtgccgctcttcgaaaatatttaattgcatcttgcaatttttgtcctttgtaagctctcatcccttttttataaaagaagtccgctaattgattaaaagagataacttgtccgttctccttatatatcctttgatttttccccatatatcctccagttttttgttttcttcgttcacacattcttctatctataagtataaacgattccgtaaaaaacaaaacagtatattatactcaattatttcctttttattcataaaaaaagaggagaaatgttacattttcaccatgaaccttctcttgcggtcatttgctctttcgtataaataatacgcattggatttccacctacgaaagcaccgctcggtacatctctatgaacaagtgtgccagctgagacagtcgcaccgtctccaatgttcacacctggtaatattgttacattcgctccaatcattacttcatttccaatgacgatttcgccaagtcgatattcacgaattaaatattcatgtgctaaaagcgttgtgttatagccaataatcgaattctctcccacagttatcttttctgggaacataatatccggcattaccataagcgcaaatgatgttttctttcctactttcatccgtaaaaaagtgcggtacaaccaattttttacggataaaaatggcgtgtaacgcgcaatttggataataataaagtttttcattaccttccaaaaagacactgttttatacacattccataacgaattttctcctgaaacaggatagcgcgttgtccgtcgcacttagctcgctcctctactaacttacttgaacctttatgaacggttcatgttagacaaaatcggtagcaaatcactcattttatctagcataaagtccggcttgtaagcctctaaatacgctctacctttcaacgtccatgaaaccgcagctgttttcgtccccgcattttgaccaccgacaatatcatgatgattatccccaaccatcaatgcctcttctggttttgcatctaataattcaagcgctttttgaagtggctccggatgtggtttcacatgctctacatcatcaattgtcacgacaacatcaaaaaattcatcaagctttgacaactgtaatcccatctcaacggtttgtctcgctttcgttgtaacaataccaactttataaccttgcttcttcaactctcgaactgtttcatatacagtttcatattcttctactaattcatcatgatgatcatggttaaatttccgatagctagtaatcatctcttcaaccttactttcatcaatcttgctgaaagtatcatgcaaagatggaccgataaatggcaacacatcttcacgcttatattgatttggataatatgtatttaaagtatgtaaaaacgaagaaataataagttcatttgtattaattaaagttccatctaaatcaaataacacggtatttattctcatcgccttagtcctttcgccttcctgaatatgaaagaagcagcatcttataataagatgctacttgtctctaattttctaaatatcttttatcagcttgccccatttttcgtctcacaataatgaaaataatagaaataacaacaagtccaattgacattacttgtgcaatacgaagtggtcctagcattaaactatctgtacgtaagccttctacgaagaagcgtcctactgaataccaaattaaatatgtgaagaataactccccgcgacgtaaattcacttttcttaatgcaagtagtaaaattacgcctgcaaaattccataatgattcatataaaaacgtcggatgatagtacacaccctcaatatacatttgattaataatgaaatccggtaaatgaagaccttctaaaaactgtctcgttacttcatcaccatgcgcctcttggttcataaagtttccccatcggccaattgcttgtcctagtaaaatacttggtgcagcaatatcagccagcttccagaaggaaaccccgcgtcgtttcgcaaaaagaacacctgtaataacagccccgattaaaccaccgtgaatcgccaaaccaccttgacgaatattaataatttgactcggattttgtgcgtaatattcccattcaaaaataacatagtacattctcgcaaaaagaatagcgatcggtactgcaattaatacaaggtcaacaaatgtatcttttggaatacctagcctttctccctcgcgagttgccagccaaagacctaatagtacacctgtaccgataataatcccgtaccaatacacaggaaacggcccaagttggatagctacacggtcaagctgtggtacagaagctaacagcatatgtatatgacctccctctccaaagtttactcctgatttcctaactcaattgcactcattaatcgttcagagaactgctgtgctgcattgactcccatacgtttcaaacggaagttcatcgctgctacttcaataataacagccaagtttcgaccaggacgaactggaagtgtaatcttcgtaagttctgtatcaataattttcatcttctcttcatcaagacctaagcgatcgtaatttttcttttgatcccaaatttcaagattaataacaagtgtaatacgcttataatttcgtactgcccctgcaccgaataacgtcataacgttaataatacctagaccacgaatttctaataaatgctcgattaaatctggtgaacttccgactaacatgtcttcatcttcttgacgaatttccacactatcatccgcaacaagacggtgaccacgctttacaagctcaagagctgtctcacttttaccaacaccactttgacctgtaattaaaacaccaacgccgtaaatatctactaacacaccatgcacagctgttgttggtgctaacttaccttctaaatagtttgttaaacgacttgataatctcgttgtcgtttgagaagaacgtaataaaggcatacctgattcacgtgatgcttgtaataactcatctggtacatcttgattacgagttacaataatacatggcgtctcctcagtacaaagcgctttcattctctcttgtttttgctctgacgttaacgtgtcaaagaaagtaagctccgttttaccaagaagctgcacacgatctgctggatagtatgtaaaaaatcctgccatttcaattccaggtcgtgataaatcacttgtatcaatcggacgatgaatgccttcttcaccactgattaactccaattgaaattgttcaattaaatcttttgttcttactttcggcatatgtataaacctccactccgctgcgggttcagtctcgtttgatgtaaaattccattctatcggatattgtaccatttttttctgaaaacaagaaatacggtttctaataaatagaaaaaaacatttcatacgaataatgaaatgtttttctttttgtcactttctctttttttcatatagaggctcaacaattgccttttcaattatcatattaaaaattgaaatacaaattgccgcaacaatcgctacaccaaatcctgatatattaaaagcatctcctaataatgaatctgctatttttaacgtaatcgcattaataacaattaagaagaagccgaaagttacaacagtaattggtagcgtaattaaaattaaaaatggctttacgaacacatttaaaaccgccaatataatactcgcaataattgcagtttgtatatttgctacgtaaaatgcatctggtgcaatcccttttaaaagtcccgatacagcgattaacacaacgctatttacaagaagtgatacaatccatctcatttcgttacacatccttttaaacatatatatttcatcatacgctaatagataagaaacgcaagtatgatacgaacacttatatcaacttattctatctttcatgcttgtatacctactaacatttcttagtaaaataagggccgcaccatctatgttcatgagtttttacaaaagtccaagtgaactccttatctacaatatagatatcacccttatacatatcgtccctctcacacaatatatcatccatatgtaacaaactcgcatcctttattaacagtacctcatcacagtgttggtagaaaatgtagcaatcctttttcacttcattatgaaacgcgttctttgcttctttaccctctaaacgcttctttttctcataactaaatatgtgccaaagatacccacatccatacttatctccataaagaaaaatgtcttctttttcttcatcacttaaatgatttgcaaagtgatcctcccagcgctttcgaaaatatacaccccaattttgaaactctcttaccttcatatttttcttccttaacacctctaaaaacttcatcttctccccctatacaataaaaaccgagcgtcatttccacccggttttcatcaataaacttattgcgataattctacttcttttattttctctttcattcttgctttatcacgatttaaaatctcttttaaatatttacctgtgtacgagcgctcttctttcactacttgctctggcgttccggaagcaacgatttgtccacctttatctccaccctctggtccaaggtcaacgatataatcagccgttttaattacatctaaattatgttcaattacaagtaccgtctcaccgctctcaacaagacgttgcaacacttctagaagacgtgcaatatcatgcgcatgcaaaccagtcgttggttcatctaaaatgtataacgtacgtcctgtagaacgacggtgtaattcagaagctaatttcacacgctgtgcttccccaccagataatgttgttgctggttgacctaatttcatataaccaagcccaacgtctacaagcgtttgaagtttacgcttaatttttgggatattagcgaagaactctactccatcttcaattgtcatccctaacacttcagaaatattcttatctttatatttcacttctaacgtttcacggttgtaacgtttaccatgacaaacttcacacggaacatacacatctggtaggaaatgcatttcgattttaataattccatcaccacggcacgcttcacaacggccaccttttacgttaaagctgaaacgtcctttttgatatccgcgcactttcgcttcattcgtttgtgcaaacacatcacgaatatcatcgaatacacctgtatacgtcgctggattagaacgtggtgtacgaccgattggtgattgatcaatatcaattactttatctaaatgttcaagacctttaatctctttatgagtacctggcttcgctttcgctttatataacttttgagctagcgatttatatagtacttcattaatcatcgtacttttaccagaaccagatacccctgttaccgctacaaacgtaccaagcgggaatgacattttcgcattctttaagttattctcttttgcgccgacaatctctactttacgtccatcacctttacgtctttcaagtggaactggaataaactctttaccgcttaaatacttccctgttaatgaattatcatcttgcatcacttcagccggcgtccctgctgaaacgacctgtccaccgtgaatacctgcaccaggccctatatcaagtaaatagtcagcagccatcatcgtatcttcatcatgttcaacaacaattaacgtattacctaaatcgcgcatttcttgcaatgtacgaataagacgatcgttatcacgctggtgtaaaccaattgaaggttcatcaagaatataaagtacgccagttagacgagaaccaatttgcgtcgctaaacgaatacgctgcgcctcaccacctgataaagttcctgcggcacgacttaacgttaaataatctaaaccaacgttcactaagaacccaacgcgctcctgaatttctcttaaaattaaatgagctattttttgttgcttctccgttagctctacattcgagaagaattcttgtacttcttgaactgaatacttcgttacgtcagcaatcgttttattgccaacaaatacagctaagctctcaggctttaagcgtccacctttacacttcggacaagcttgttctgccatatacttttccatttgctcacgaatgtaatcggagctcgtttcacgataacgacgttcaatgtttggaataacaccttcaaataaaatctcattttcctttacttgaccaaattcatttacatagcggaaataaaccttctcttccccgcttccgtacaacactttatcaaataaatctttcggtatatttttcacaggcacatccatatcaacgccgtagtgattacatacagattgtaaaagttgcgggtaatattgtgaacttgtcggttcccaaggtgcaattgcatgttcatttaatgataaatcccagttcgggataacaagctctaaatctacctctagctttgaaccaagtccatcacaagaaggacatgctccgaacggactgttgaatgagaacatacgcggctctaattctccgattgaaaaaccacaatgcggacaagcatgatgttcactaaatagaagttcctcttctcccattacatcaattaacactcggcctccgccaagctttaatgcactttcaagtgaatcagcaagacggcttgcgattccttcttttacaacaatacggtcaattacaacttcaatggaatgcttcttatttttatctaacgtaatatcttcagatacatcaagcatttcaccatcaacacgtacacgaacatatccttgcttcttaatatcttcaagtactttcacatgtgcacctttacgcccagacacgataggagctaacacttgtaatttcgtacgttcaggatattcaagaacacggtctaccatctgctctactgtttgtgatgtaatttcaatcccatgatttggacaaattggcgtaccaattcgcgcaaataataaacgtaaataatcataaatctccgttaccgttccgacagttgaacgtggattacgactcgtcgttttttgatcgattgaaatcgctggtgacaatccttcaatcgtgtcaacatccggcttatccatttgtcctaaaaactggcgcgcatacgcagataatgattctacgtatctgcgctgcccttctgcataaatcgtatcaaatgctaatgatgatttccccgaaccagacaatcccgttacaacgacaagctgatttctcggaatggttacatcaatattttttaagttatgtgctctagcaccttttacaacgataaaatccttgctcttactcacttttttcacccttccgcttttaattctaatagtaaatctcttagttcagctgcacgctcgaagtctaacgcttttgctgcttctttcatctctgcttccatcttcgcaattgtcttttcgcgctcttttttcgtcattttcttagaaggagttgcttcgtatgtttctgcctcttcagcagctgtcgttgcacggataacatcacgaacgcctttttgaatcgttttcggcgtaataccatgctcttcattgtaagcttcttgtatactacgacgacgcttcgtttcttcaatcgcaattcccatagatttcgttatacgatctgcatacataataacgcggccgttttcattacgcgcggcacgaccaattgtttgaattaatgaacgttctgaacgcaaaaatccttccttatcagcatctaaaatagcgacaagtgatacttccggaatatctaatccttctcgcaataagttaatgccgacaagtacatcaaatttaccgaggcgaagatcacggataatttcaatacgttctaacgttttaatttcagagtgaagatagttaactttaattcctacatcttttaagtaatccgttaaatcctctgacattttcttcgttaaagtcgtaattaatacacgttcattttttgcaatacgatcttgaatctctcctaataaatcgtcaatttgcccttcaattggtcgtatatcaattggtggatctaaaagccctgttggacgaataatttgttctattacttctggtgactgctctaactcgtacggtcctggcgttgctgaaacgtaaataacttgattcgttttctcctcaaactcatcaaacatgagcggtctattatctaaagctgatggcagacggaatccatgatccacaagcacttgtttacgtgcttggtcaccgttatacatcgctcttacttgtggtactgatacgtgcgactcatccataacgattaagaaatctttcggaaaatagtctaataacgtatacggcgttgcccccgctggacgaagtgttaaatgacgggagtagttttcaatacctgaacaaaagcccatctcgcgcatcatttctaaatcataacgtgtacgttgctctatacgctgcgcttctaacaacttaccgttatcatttaactcctttaaacgttcttctaattctttttcgatattttcaatagcgaccttcattttctcttcacgtgtaacgaagtgagatgctgggaagattgctacatgatcacgttctgctaatacttcacctgttaacgcatttacttcacgaatacgatcgatttcatcaccgaaaaactcaattcgaatacaatgctcatcaagtgatgctgggaagatttcaactacatctccgcgtacacggaatgtaccacgcttgaaatcaatatcattacgtccatactgtacatcaacaagttcacgaagcaattgattacggtctttttccataccaactcgaagcgaaacaactagctcgcggtattcttctggagaacctaagccatatatacacgaaacactcgcaacgataattacatcgtcccgttcaaataatgcagacgttgccgag
